(19) United States
(12) Patent Application Publication
(10) Pub. No.: US 2023/0113563 A1
(43) Pub. Date: Apr. 13, 2023

(54) GUIDANCE AND NAVIGATION CONTROL (GNC) ANTIBODY-LIKE PROTEINSAND METHODS OF MAKING AND USING THEREOF

(71) Applicants: SYSTIMMUNE, INC., Redmond, WA (US); BAILI-BIO (CHENGDU) PHARMACEUTICAL CO., LTD., Chengdu, Sichuan (CN)

(72) Inventors: Yi Zhu, Redmond, WA (US); Dennis R. Goulet, Redmond, WA (US); Tsung-I Tsai, Redmond, WA (US); Soumili Chatterjee, Bothell, WA (US); Blair Renshaw, Renton, WA (US); Christopher G. Vincent, Lynnwood, WA (US); Andrew Waight, Kenmore, WA (US); Nga Sze Amanda Mak, Mukilteo, WA (US)

(21) Appl. No.: 17/909,358

(22) PCT Filed: Mar. 17, 2021
(86) PCT No.: PCT/US21/22849

§ 371 Date: Sep. 2, 2022

Related U.S. Application Data
(60) Provisional application No. 62/991,042, filed on Mar. 17, 2020.

(51) Int. Cl. C07K 16/28; C07K 16/30; A61P 35/00; A61K 47/68

(52) U.S. Cl. CPC C07K 16/2851; C07K 16/2827; C07K 16/2878; C07K 16/2809; C07K 16/30; A61P 35/00; A61K 47/6803; A61K 47/6879; C07K 2317/31; C07K 2317/24; C07K 2317/55; C07K 2317/92

(57) ABSTRACT

The application provides multi-specific antibody-like proteins may comprising one or more binding domains including a first binding domain (D1), a second binding domain (D2), a third binding domain (D3), a fourth binding domain (D4), a fifth binding domain (D5), or a sixth binding domain (D6). The multi-specific antibody-like protein disclosed herein may be mono-specific, bi-specific, tri-specific, tetra-specific, penta-specific or hexa-specific. The binding domains such as D1, D2, D3, D4, D5, and D6 may each independently have a binding affinity to specificity against a T cell activating receptor, an immune cell receptor, an immune checkpoint molecule, a co-stimulation factor, a receptor of a leukocyte, a tumor antigen, a tumor associated antigen (TAA), a receptor of a tissue cell, a receptor of a cancer cell, or a combination thereof.

### CROSS REFERENCE TO RELATED APPLICATIONS

[0001] This application claims the benefit of the filing date of U.S. Provisional Application Ser. No. 62/991,042 filed Mar. 17, 2020 under 35 U.S.C. 119(e), the entire disclosures of which are incorporated by reference herein.

### TECHNICAL FIELD

[0002] The present application generally relates to the technical field of multi-specific antibody for cancer immunotherapy and more particularly relates to making and using Guidance and Navigation Control (GNC) antibodies with multiple binding activities against surface molecules of both immune cells and tumor cells.

### BACKGROUND

[0003] Cancer cells develop various strategies to evade the immune system. There is an urgent need to improve biological therapeutics functionality, specificity, potency, and efficacy. The success of targeted therapies in cancer treatment has also been impeded by various mechanisms of resistance. Tumor plasticity has emerged as a mode of targeted therapy evasion in various cancers, ranging from prostate and lung adenocarcinoma to melanoma and basal cell carcinoma. It is thought that the mechanisms interfering in shaping robust antitumor immune responses include at least some of the following categories: 1) defective tumor antigen processing or presentation; 2) lack of activating mechanisms; 3) inhibitory mechanisms and immunosuppressive state; and 4) resistant tumor cells (4). To overcome these mechanisms of escaping and resisting, new therapeutic strategies are designed to facilitate multiple immune effectors, including but not limited to, T-cell engager, checkpoint inhibitors, and innate immunity into the combination immunotherapy strategy. However, such strategies of combination therapy often mean two or more independent biologics products, which require manufacture of independent biologics as well as approval of the clinical safety and efficacy of each product. Combination therapies may target either immune cells or tumor cells or both. For instance, there are antibody therapies using bispecific antibodies targeting both CD3 and CD19 or CAR-T cell therapy comprising engineered T cells expressing anti-CD19 chimeric antibody. One common side effect from these immunotherapies is cytokine release syndrome, which is indicative of insufficient immune regulation. In this context, new strategies are needed to overcome tumor plasticity, i.e. the heterogeneous and dynamic expression of tumor antigens and/or resistant tumor cells, while acquiring additional immune regulation.

[0004] Towards this end, a platform of multi-specific antibodies, also known as Guidance and Navigation Control (GNC), has been established to facilitate multiple targeting of T-cell engagers, co-stimulation factors, checkpoint inhibitors, and tumor antigens (see Applicant's applications, WO/2019/005641, WO2019191120, and PCT/US20/59230, incorporated herein in its entirety). In addition, tetra-specific GNC (tetraGNC) antibodies may be used to manufacture GNC-T cell therapy for treating both liquid and solid tumors. In spite of multifunctional GNC molecules, epitope-negative tumor cells can remain un-targeted and consequently evade immunotherapies. For instance, the expression of NKG2D ligands are tightly regulated to prevent autoimmune tissue damage and therefore normal tissues generally do not express NKG2D ligands. Using the NKG2D receptor may therefore be an effective targeting mechanism for cancer immunotherapy via an innate immune recognition process. In this context, there is a clear need to further develop multi-specific antibodies related cell therapy. While a multi-specificity single drug remains highly desirable and cost-effective, it is technically challenging to design, express, and manufacture a potent and stable multi-specific antibody beyond tetra-GNC antibodies.

### SUMMARY

[0005] The following summary is illustrative only and is not intended to be in any way limiting. In addition to the illustrative aspects, embodiments, and features described above, further aspects, embodiments, and features will become apparent by reference to the drawings and the following detailed description.

[0006] The application provides proteins with binding specificities such as multi-specific antibody-like protein may include multi-specific antibodies, the fragments of these binding proteins may include without limitation scFv domain, Fab region, Fc domain, VH, VL, light chains, heavy chains, variable regions, and complementary determining region (CDR), methods of making and method using the multi-specific antibody-like proteins and fragments thereof.

[0007] In one embodiment, the multi-specific antibody-like protein may be multi-specific antibodies, monoclonal antibodies, isolated monoclonal antibodies, or humanized antibodies.

[0008] In one embodiment, the proteins may comprise various domains and regions such as binding domains. In one embodiment, the multi-specific antibody-like protein may include one or more binding domains including a first binding domain (D1), a second binding domain (D2), a third binding domain (D3), a fourth binding domain (D4), a fifth binding domain (D5), or a sixth binding domain (D6). The multi-specific antibody-like protein disclosed herein may be mono-specific, bi-specific, tri-specific, tetra-specific, penta-specific or hexa-specific.

[0009] In one embodiment, the binding domains such as D1, D2, D3, D4, D5, and D6 may each independently have a binding affinity to specificity against a T cell activating receptor, an immune cell receptor, an immune checkpoint molecule, a co-stimulation factor, a receptor of a leukocyte, a tumor antigen, a tumor associated antigen (TAA), a receptor of a tissue cell, a receptor of a cancer cell, or a combination thereof.

[0010] In one embodiment, the T cell activating receptor may comprise CD3. In one embodiment, the immune checkpoint receptor may comprise PD-L1, PD-1, TIGIT, TIM-3, LAG-3, CTLA4, BTLA, VISTA, PD-L2, CD160, LOX-1, siglec-15, CD47, HVEM SIRPα, CSF1R, CD73, Siglec-15, CD47, or a combination thereof. In one embodiment, the co-stimulating receptor may comprise 4-1BB, CD28, OX40, GITR, CD40L, CD40, ICOS, LIGHT, CD27, CD30, or a combination thereof. In one embodiment, the tumor associated antigen may comprise EGFR, HER2, HER3, EGRFVIII, CD19, BCMA, CD20, CD33, CD123, CD22, CD30, ROR1, CEA, LMP1, LMP2A, Mesothelin, PSMA, EpCAM, glypican-3, gpA33, GD2, TROP2, NKG2D ligand, CD39, CLDN18.2, DLL3, HLA-G, FcRH5, GPRC5D, LIV-1, MUC1, CD138, CD70, uPAR, CD38, or a combination thereof.

[0011] In one embodiment, the binding domain for a T cell activating receptor is adjacent to the binding domain for a tumor associated antigen (TAA).

[0012] In one embodiment, the D1, D3, D4, D5, and D6 may be independently a scFv domain, a receptor, or a ligand. In one embodiment, at least one, two, three, four, or five of D1, D3, D4, D5, and D6 in the hexa-specific antibody-like protein include an scFv domain. In one embodiment, all of D1, D3, D4, D5, and D6 are all scFv domains.

[0013] In one embodiment, at least one, two, three, four, or five of D1, D3, D4, D5, and D6 in the hexa-specific antibody-like protein include a receptor. In one embodiment, all of D1, D3, D4, D5, and D6 are all receptors.

[0014] In one embodiment, at least one, two, three, four, or five of D1, D3, D4, D5, and D6 in the hexa-specific antibody-like protein include a ligand. In one embodiment, all of D1, D3, D4, D5, and D6 are all ligands.

[0015] In one embodiment, the scFv domain may comprise a VH linked to a VL in the orientation of VH-VL or VL-VH. In one embodiment, the scFv domain may comprise a disulphide bond between the VL and the VH. In one embodiment, the disulfide bond is between VL100 and VH44 of the scFv domain. In one embodiment, the scFv domain may comprise a substitution R19S (Kabat) in the VH.

[0016] In one embodiment, the multi-specific antibody-like protein may include a Fc region. In one embodiment, the Fc region is engineered to eliminate effector cell functions including without limitation ADCC, ADCP, or CDC. In one embodiment, the Fc region comprise at least one mutation at L234A, L235A, G237A, or K322A (Eu numbering). In one embodiment, the Fc region comprise mutations at L234A/L235A/G237A/K322A. In one embodiment, the Fc region comprise mutations at L234A/L235A/K322A (Eu numbering).

[0017] The domains and regions may be linked through linkers. In one embodiment, the linker may comprise a (GₓS_{y})ₙ linker, wherein n, x and y each independently is an integer from 1 to 10. In one embodiment, n is 1, 2, 3, 4, 5, 6, 7, 8, 9, or 10. In one embodiment, x is 1, 2, 3, 4, 5, 6, 7, 8, 9, or 10. In one embodiment, y is 1, 2, 3, 4, 5, 6, 7, 8, 9, or 10.

[0018] In one aspect, the application provides hex-specific antibody-like proteins. In one embodiment, the hexa-specific antibody-like protein having a N-terminal and a C-terminal, may include in tandem from the N-terminal to the C-terminal, a first binding domain (D1) at the N-terminal, a Fab region as a second binding domain (D2) may include a light chain, a Fc region, a third binding domain (D3) having a binding affinity to PD-L1, and a fourth binding domain (D4) having a binding affinity to 4-1BB at the C-terminal, wherein the light chain may comprise a fifth binding domain (D5) covalently attached to the C-terminal and a sixth binding domain (D6) covalently attached to the N-terminal, and wherein D1, D2, D5, and D6 each independently may have a binding affinity to a tumor associated antigen (TAA) or CD3.

[0019] In one embodiment, the hexa-specific antibody-like protein may have D1 or D2 having binding affinity to CD3. In one embodiment, the hexa-specific antibody-like protein may have D1 having a binding affinity to CD3. In one embodiment, the hexa-specific antibody-like protein may have D2 having a binding affinity to CD3.

[0020] In one embodiment, the hexa-specific antibody-like protein may include D1 having a binding specificity against CD3, D2 having a binding specificity against EGFR, EGFRvIII, CD20, mesothelin, Claudin18.2, HER2, CD33or a combination thereof, D3 having a binding specificity against PD-L1, D4 having a binding specificity against 4-1BB, and D5 and D6 each independently having a binding specificity against a tumor associated antigen.

[0021] In one embodiment, the hexa-specific antibody-like protein may include D1 having a binding specificity against CD3, D2 having a binding specificity against a tumor associated antigen, D3 having a binding specificity against PD-L1, D4 having a binding specificity against 4-1BB, and D5 and D6 each independently having a binding specificity against NKG2D ligands, HER3, CD19 or a combination thereof.

[0022] In one embodiment, the hexa-specific antibody-like protein may include D1 having a binding specificity against EGFR, D2 having a binding specificity against CD3, D3 may have a binding specificity against PD-L1, D4 having a binding specificity against 4-1BB, and D5 having a binding specificity against CD19, and D6 having a binding specificity against HER3.

[0023] In one embodiment, the hexa-specific antibody-like protein having D1 may have a binding specificity against EGFR, D2 having a binding specificity against CD3, D3 having a binding specificity against PD-L1, D4 having a binding specificity against 4-1BB, and D5 having a binding specificity against HER3, and D6 having a binding specificity against CD19.

[0024] In one embodiment, the hexa-specific antibody-like protein may include D1 having a binding specificity against CD3, D2 having a binding specificity against EGFR, D3 having a binding specificity against PD-L1, D4 having a binding specificity against 4-1BB, and D5 having a binding specificity against HER3, and D6 having a binding specificity against CD19.

[0025] In one embodiment, the hexa-specific antibody-like protein may include an amino acid sequence having at least 50%, 60%, 70%, 80%, 85%, 90%, 95%, 98%, 99%, or 100% of sequence identify to SEQ ID NO. 176, 178, 106, 108, 332, 334, 324, 326, 328, or 330.

[0026] In one aspect, the application provides tetra-specific or penta-specific antibody-like proteins. In one embodiment, the antibody-like protein having a N-terminal and a C-terminal, may include in tandem from the N-terminal to the C-terminal, a first binding domain (D1) at the N-terminal, a Fab region as a second binding domain (D2) may include a light chain, wherein the light chain optionally may comprise a fifth binding domain (D5) covalently attached to the C-terminal or a sixth binding domain (D6) covalently attached to the N-terminal, a Fc region, a third binding domain (D3), and a fourth binding domain (D4) at the C-terminal. In one embodiment, the multi-specific antibody-like protein comprise an amino acid sequence having at least 50%, 60%, 70%, 80%, 85%, 90%, 95%, 98%, 99%, or 100% of sequence identify to SEQ ID NO. 110, 112, 116, 118, 122, 124, 128, 130, 134, 136, 140, 142, 146, 148, 152, 154, 158, 160, 164, 166, 170, 172, 112,114, 118, 120, 124, 126, 130, 132, 136, 138, 142, 144, 148, 150, 154, 156, 160, 162, 166, 168, 172, 174, 34, 36, 38, 40, 42, 44, 46, 48, 50, 52, 54, 56, 302, 304, 306, or 308.

[0027] In one embodiment, the multi-specific antibody-like protein may tetra-specific. In one embodiment, the multi-specific antibody-like protein may penta-specific. In one embodiment, D2, D5, and D6 each independently may have a binding affinity to a tumor associate antigen (TAA).

[0028] In one embodiment, the tetra-specific antibody-like protein may have D1 having a binding specificity against CD3, D2 having a binding specificity against a tumor-associated antigen, D3 having a binding specificity against PD-L1, and D4 having a binding specificity against 4-1BB.

[0029] In one embodiment, the tetra-specific antibody-like protein may have D1 having a binding specificity against CD3, D2 having a binding specificity against an antigen selected from a group consisting of EGFR, HER2, CD19, CD20, CD22, CD30, CD22, mesothelin, GD2, and Claudin 18.2, D3 having a binding specificity against PD-L1, and D4 having a binding specificity against 4-1BB.

[0030] In one embodiment, the penta-specific antibody-like protein may have D1 having a binding specificity against CD3, D2 and D5 independently each having a binding specificity against a tumor-associated antigen, D3 having a binding specificity against PD-L1, and D4 having a binding specificity against 4-1BB.

[0031] In one embodiment, the penta-specific antibody-like protein may have D1 having a binding specificity against CD3, D2 having a binding specificity against a tumor-associated antigen, D3 having a binding specificity against PD-L1, D4 having a binding specificity against 4-1BB, and D5 having a binding specificity against HER3.

[0032] In one embodiment, the penta-specific antibody-like protein may have D1 having a binding specificity against CD3, D2 having a binding specificity against EGFR or EGFRvIII, D3 having a binding specificity against PD-L1, D4 having a binding specificity against 4-1BB, and D5 having a binding specificity against HER3.

[0033] In one embodiment, the penta-specific antibody-like protein may have D1 having a binding specificity against CD3, D2 having a binding specificity against CD20, D3 having a binding specificity against PD-L1, D4 having a binding specificity against 4-1BB, and D5 having a binding specificity against CD19.

[0034] In one embodiment, the penta-specific antibody-like protein may have D1 and D6 independently having a binding specificity against a tumor-associated antigen, D2 having a binding specificity against CD3, D3 having a binding specificity against PD-L1, and D4 having a binding specificity against 4-1BB.

[0035] In one embodiment, the penta-specific antibody-like protein may have D1 having a binding specificity against EGFR, D2 having a binding specificity against CD3, D3 having a binding specificity against PD-L1, D4 having a binding specificity against 4-1BB, and D6 having a binding specificity against CD19.

[0036] In one aspect, the application provides multi-specific antibody-like protein with at least one binding domain as a receptor. In one embodiment, the receptor is NKG2D.

[0037] In one embodiment, the multi-specific antibody-like protein having a N-terminal and a C-terminal, may include in tandem from the N-terminal to the C-terminal, optionally a first binding domain (D1) at the N-terminal, a second binding domain (D2) may include a light chain, wherein the light chain optionally may comprise a fifth binding domain (D5) covalently attached to the C-terminal, a sixth binding domain (D6) covalently attached to the N-terminal, or both, a Fc region, optionally a third binding domain (D3), and optionally a fourth binding domain (D4) at the C-terminal, wherein at least one of D1, D2, D3, D4, D5, and D6 is a NKG2D, and wherein D1, D2, D3, D4, D5, and D6 each independently may have a binding affinity to specificity against a T cell activating receptor, an immune cell receptor, an immune checkpoint molecule, a co-stimulation factor, a receptor of a leukocyte, a tumor antigen, a tumor associated antigen (TAA), a receptor of a tissue cell, a receptor of a cancer cell, or a combination thereof.

[0038] In one embodiment, the NKG2D containing multi-specific antibody-like protein may mono-specific, bi-specific, tri-specific, tetra-specific or penta-specific.

[0039] In one embodiment, the NKG2D containing multi-specific antibody-like protein may have D2 comprising a dimer connected to CL and CH1, wherein the dimer is NKG2D. In one embodiment, the NKG2D containing mono-specific antibody-like protein may include an amino acid sequence having at least 50%, 60%, 70%, 80%, 85%, 90%, 95%, 98%, 99%, or 100% sequence identify to SEQ ID NO. 196 or 198.

[0040] In one embodiment, the NKG2D containing multi-specific antibody-like protein may have D1, D2, D3, D4, D5 and D6 each independently having a binding specificity against an antigen selected from EGFR, HER2, HER3, EGFRvIII, ROR1, CD3, CD28, CEA, LMP1, LMP2A, Mesothelin, PSMA, EpCAM, glypican-3, gpA33, GD2, TROP2, NKG2D, NKG2D ligand, BCMA, CD19, CD20, CD33, CD123, CD22, CD30, PD-L1, PD1, OX40, 4-1BB, GITR, TIGIT, TIM-3, LAG-3, CTLA4, CD40, CD40L, VISTA, ICOS, BTLA, LIGHT, HVEM, CSF1R, CD73, CD39, CLDN18.2, DLL3, HLA-G, FcRH5, GPRC5D, LIV-1, MUC1, CD138, CD70, CD16, uPAR, Siglec-15, CD47, CD38, NKp46, PD-L2, CD160, LOX-1, SIRPα, CD27, and wherein the Fc domain may comprise a human IgG Fc domain.

[0041] In one embodiment, the NKG2D containing multi-specific antibody-like protein may have D2, D5, and D6 each independently having a binding specificity against a tumor associated antigen. In one embodiment, the NKG2D containing multi-specific antibody-like protein may have D2 having a binding specificity against a tumor associated antigen. In one embodiment, the NKG2D containing multi-specific antibody-like protein may have D1, D2, D3, and D4 each independently having a binding specificity against NKG2D ligands, CD3, PD-L1, 4-1BB or a combination thereof.

[0042] In one embodiment, the NKG2D containing multi-specific antibody-like protein an amino acid sequence having at least 50%, 60%, 70%, 80%, 85%, 90%, 95%, 98%, 99%, or 100% of sequence identify to SEQ ID NO. 2, 4, 6, 8, 10, 12, 14, 16, 18, 20, 22, 24, 26, 28, 58, 60, 62, 64, 66, 68, 70, 72, 74, 76, 184, 186, 188, 190, 192, 194, 196, 198, 200, 202, 204, 206, 208, 210, 78, 80, 82, 84, 86, 88, 30 or 32.

[0043] In one embodiment, the NKG2D containing multi-specific antibody-like protein D1 having a binding specificity against NKG2D ligands, D2 having a binding specificity against CD3, D3 having a binding specificity against PD-L1, and D4 having a binding specificity against 4-1BB.

[0044] In one embodiment, the NKG2D containing multi-specific antibody-like protein D1 having a binding specificity against NKG2D ligands, D2 having a binding specificity against CD3, D3 having a binding specificity against 4-1BB, and D4 having a binding specificity against PD-L1.

[0045] In one embodiment, the NKG2D containing multi-specific antibody-like protein D1 having a binding specificity against 4-1BB, D2 having a binding specificity against PD-L1, D3 having a binding specificity against CD3, and D4 having a binding specificity against NKG2D ligands.

[0046] In one embodiment, the NKG2D containing multi-specific antibody-like protein D1 having a binding specificity against PD-L1, D2 having a binding specificity against 4-1BB, D3 having a binding specificity against CD3, and D4 having a binding specificity against NKG2D ligands.

[0047] In one embodiment, the NKG2D containing multi-specific antibody-like protein D1 having a binding specificity against CD3, D2 having a binding specificity against a tumor-associated antigen, D3 having a binding specificity against PD-L1, D4 having a binding specificity against 4-1BB, and D5 having a specificity against NKG2D ligands.

[0048] In one embodiment, the NKG2D containing multi-specific antibody-like protein D1 having a binding specificity against CD3, D2 having a binding specificity against an antigen selected from a group consisting of mesothelin, claudin 18.2, HER2, EGFRvIII, and CD33, D3 having a binding specificity against PD-L1, D4 having a binding specificity against 4-1BB, and D5 having a specificity against NKG2D ligands.

[0049] In one embodiment, the NKG2D containing multi-specific antibody-like protein D1 having a binding specificity against CD3 and D2 having a binding specificity against NKG2D ligands.

[0050] In one embodiment, the NKG2D containing multi-specific antibody-like protein D1 having a binding specificity against CD3, D2 having a binding specificity against NKG2D ligands, and D6 having a binding specificity against a tumor-associated antigen.

[0051] In one embodiment, the NKG2D containing multi-specific antibody-like protein D1 having a binding specificity against CD3, D2 having a binding specificity against NKG2D ligands, and D6 having a binding specificity against CD19.

[0052] In one embodiment, the NKG2D containing multi-specific antibody-like protein D1 having a binding specificity against CD3, D2 having a binding specificity against NKG2D ligands, D3 having a binding specificity against PD-L1, and D4 having a binding specificity against 4-1BB.

[0053] In one embodiment, the NKG2D containing multi-specific antibody-like protein D1 having a binding specificity against CD3, D2 having a binding specificity against NKG2D ligands, D3 having a binding specificity against PD-L1, D4 having a binding specificity against 4-1BB, and D6 having a binding specificity against a tumor-associated antigen.

[0054] In one embodiment, the NKG2D containing multi-specific antibody-like protein D1 having a binding specificity against CD3, D2 having a binding specificity against NKG2D ligands, D3 having a binding specificity against PD-L1, D4 having a binding specificity against 4-1BB, and D6 having a binding specificity against CD19.

[0055] In a second aspect, the application provides isolated nucleic acid sequences encoding an amino acid sequence of the multi-specific antibody-like protein as disclosed thereof.

[0056] In a third aspect, the application provides expression vector. In one embodiment, the expression vector includes isolated nucleic acid sequence as disclosed herein.

[0057] In a further aspect, the application provides host cell including the isolated nucleic acid sequences disclosed herein. In one embodiment, the host cell is a prokaryotic cell. In one embodiment, the host cell is a eukaryotic cell.

[0058] In a further aspect, the application provides method for producing a multi-specific antibody-like proteins of their fragments thereof. In one embodiment, the method may include the steps of culturing a host cell may include an isolated nucleic acid sequence such that the DNA sequence encoding the multi-specific antibody or monomer is expressed, and purifying said multi-specific antibody, wherein the isolated nucleic acid sequence encodes an amino acid of the multi-specific antibody-like proteins or their fragments thereof.

[0059] In a further aspect, the application provides immunoconjugates. In one embodiment, the immuno-conjugate may include a cytotoxic agent or an imaging agent linked to the multi-specific antibody of claim 30 through a linker, wherein the linker may comprise an ester bond, an ether bond, an amid bond, a disulphide bond, an imide bond, a sulfone bond, a phosphate bond, a phosphorus ester bond, a peptide bond, a hydrophobic poly(ethylene glycol) linker, or a combination thereof. In one embodiment, the cytotoxic agent or the imaging agent may comprise a chemotherapeutic agent, a growth inhibitory agent, a cytotoxic agent from class of calicheamicin, an antimitotic agent, a toxin, a radioactive isotope, a toxin, a therapeutic agent, or a combination thereof.

[0060] In a further aspect, the application provides pharmaceutical compositions. In one embodiment, the pharmaceutical composition may include a pharmaceutically acceptable carrier and the multi-specific antibody-protein or their fragments thereof, the immuno-conjugate disclosed herein, or both. In one embodiment, the pharmaceutical composition further may include a therapeutic agent selected from a radioisotope, radionuclide, a toxin, a chemotherapeutic agent or a combination thereof.

[0061] In a further aspect, the application provides method for treating or preventing a cancer, an autoimmune disease, or an infectious disease in a subject. In one embodiment, the method includes the steps of administering a pharmaceutical composition that may include a purified multi-specific antibody-like protein of their fragments thereof. In one embodiment, the method may include administering to the subject an effective amount of the purified multi-specific antibody-like protein, immunoconjugates, or pharmaceutical composition disclosed herein.

[0062] In one embodiment, the method may further include co-administering an effective amount of a therapeutic agent, wherein the therapeutic agent may comprise an antibody, a chemotherapy agent, an enzyme, an anti-estrogen agent, a receptor tyrosine kinase inhibitor, a kinase inhibitor, a cell cycle inhibitor, a check point inhibitor, a DNA, RNA or protein synthesis inhibitor, a RAS inhibitor, an inhibitor of PD1, PD-L1, CTLA4, 4-1BB, OX40, GITR, ICOS, LIGHT, TIM3, LAG3, TIGIT, CD40, CD27, HVEM, BTLA, VISTA, B7H4, CSF1R, NKG2D ligand, CD73, or a combination thereof.

[0063] In one embodiment, the subject is a human. In one embodiment, the subject is a mammal. In one embodiment, the subject is chimpanzee. In one embodiment, the subject is a pet animal.

[0064] In a further aspect, the application provides solutions including an effective concentration of the purified multi-specific antibody-like protein or their fragments thereof, immunoconjugates, or pharmaceutical composition as disclosed herein. In one embodiment, the solution is blood plasma in a human subject.

### BRIEF DESCRIPTION OF THE DRAWINGS

[0065] The foregoing and other features of this disclosure will become more fully apparent from the following description and appended claims, taken in conjunction with the accompanying drawings. Understanding that these drawings depict only several embodiments arranged in accordance with the disclosure and are, therefore, not to be considered limiting of its scope, the disclosure will be described with additional specificity and detail through use of the accompanying drawings, in which:

[0066] FIG. 1 depicts the configuration of hexaGNC antibodies having either a Fab region or a dimer receptor as the D2 binding domain, and 5 antigen binding domains added to the heavy (D1, D3, and D4) and light chain (D5 and D6) with diverse structures selected from variable sequence based scFv, and non-variable sequence coded receptor and ligand;

[0067] FIG. 2 shows the results of analytical SEC demonstrating the stability and high quality of purified tetraGNC antibodies comprising NKG2D receptor and 41BBL (A-C), and purified NKG2D pentaGNC (D);

[0068] FIG. 3 shows TDCC assay measuring the comparative potency of 4 tetraGNC antibodies (SI-49E1, SI-49E2, SI-49E3, SI-49E4) and 2 bispecific control antibodies lacking both αPD-L1 and α41BB domains (SI-49X1 and SI-49X2) when targeting MICA expressing MDA-MB-231 cell line;

[0069] FIG. 4 shows TDCC assay measuring the comparative potency of one NKG2D-αMSLN penta GNC (SI-49P1), two αMSLN tetraGNC (SI-51E4 and SI-51E1), and one NKG2D-αMSLN triGNC (SI-51X1, control) when targeting MICA- and mesothelin-expressing MDA-MB-231 cells;

[0070] FIG. 5 shows TDCC assay measuring the comparative potency of a group of tetraGNC antibodies having a trio of moiety 1 binding domains and a single moiety 2 binding specificity to variety of tumor antigens when targeting cervical cancer cells (Hela);

[0071] FIG. 6 shows TDCC assay measuring the comparative potency of multi-specific GNC antibodies having the same binding specificity to EGFR for all molecules and also HER3 for SI-1 and SI-1P2, in the presence (SI-1P2, SI-55E1 and SI-55E2) and the absence of moiety 1 binding specificity (SI-1) when targeting EGFR-expressing MDA-MB-231 breast cancer cells;

[0072] FIG. 7 shows TDCC assay measuring the comparative potency of tetraGNC with (SI-50E6, stapled) and without (SI-50E1) addition disulfide bonds in all of its scFv domains, as compared to a biGNC antibody (SI-50X1) when targeting EGFR-expressing MDA-MB-231 breast cancer cells; and

[0073] FIG. 8 depicts the generation of a class of multi-specific GNC antibodies having a trio of moiety 1 binding specificities to CD3, PD-L1, and 4-1BB from D1, D3, and D4 and any combination of moiety 2 binding specificities, i.e. to three tumor antigens, from D2, D5, and D6 by using a modular cloning system.

### DETAILED DESCRIPTION

[0074] In the following detailed description, reference is made to the accompanying drawings, which form a part hereof. In the drawings, similar symbols typically identify similar components, unless context dictates otherwise. The illustrative embodiments described in the detailed description, drawings, and claims are not meant to be limiting. Other embodiments may be utilized, and other changes may be made, without departing from the spirit or scope of the subject matter presented herein. It will be readily understood that the aspects of the present disclosure, as generally described herein, and illustrated in the Figures, can be arranged, substituted, combined, separated, and designed in a wide variety of different configurations, all of which are explicitly contemplated herein.

[0075] The disclosure provides, among others, isolated antibodies, methods of making such antibodies, bispecific or multi-specific molecules, antibody-drug conjugates and/or immuno-conjugates composed from such antibodies or antigen binding fragments, pharmaceutical compositions containing the antibodies, bispecific or multi-specific molecules, antibody-drug conjugates and/or immuno-conjugates, the methods for making the molecules and compositions, and the methods for treating cancer using the molecules and compositions disclosed herein.

[0076] The present application relates to methods of making and using multi-specific GNC antibodies, in particular, tetra-, penta-, and hexa-specific GNC (tetraGNC, pentaGNC, hexaGNC) antibodies. In general, GNC proteins, such as GNC antibodies, are characterized by comprising two moieties: moiety 1 for engaging immune cells, such as activating T cells, while moiety 2 targeting tumor cells. GNC antibodies retain multiple antigen binding domains for engaging immune cells, such as anti-CD3 for T cell activation, anti-4-1BB for co-stimulation, and anti-PD-L1 for inhibiting immune checkpoint. To improve the efficacy of antibody therapy for treating cancer, GNC antibodies are designed to be structurally stable and compact while retaining the characteristic feature of two moieties in GNC antibodies. This improvement allows an additional binding specificity to a second tumor associated antigen on the same or different tumor cell. GNC antibodies contain an Fc domain that allows for FcRn-mediated recycling and half-life extension, as well as facile protein A-based purification. The Fc receptor-mediated immunity may be incorporated if desired. GNC antibodies are usually larger than an IgG antibody due to increased number of antigen binding domains (AgBD), which provides spatial flexibility for binding to both a T cell and a tumor cell. GNC antibodies may be an efficacious antibody therapeutics for treating cancer by targeting one or more tumor antigens, including but not limited to, BCMA, CD19, CD20, CD33, CD123, CD22, CD30, ROR1, CEA, HER2, HER3, EGFR, EGFRvIII, LMP1, LMP2A, Mesothelin, PSMA, EpCAM, glypican-3, gpA33, GD2, TROP2. Multi-specific T-cell engaging antibodies, such as tetra-GNC and penta-GNC antibodies, have distinctive advantages over conventional immunotherapies. They demonstrate cross-linking functionality of CD3 on T cells with tumor associated antigens (TAAs), which re-directs and guides them to kill tumor cells without the need of removing T cells from the patient and/or genetically modifying them to be specific for tumor cells before re-introducing them back into the patient (also known as chimeric antigen receptor T cells, or CAR-T therapy). A GNC protein-mediated antibody therapy or T cell therapy does not involve genetic modification of T cells, the latter of which may carry the risk of transforming modified T cells to clonal expansion, i.e. T cell leukemia.

[0077] The present application discloses tetra-, penta-, and hexa-specific GNC (tetraGNC, pentaGNC, hexaGNC) antibodies comprising a heavy chain (HC) and a light chain (LC) as elucidated in FIG. 1. The hexaGNC antibodies may be configured to have either a Fab region or a dimer receptor as the D2 binding domain, and 5 antigen binding domains added to the heavy (D1, D3, and D4) and light chain (D5 and D6) with diverse structures selected from variable sequence-based antibody fragments, such as scFv, and non-variable sequence coded receptor and ligand. The VH and VL of the Fab region may be replaced by a non-Fab dimer with or without binding specificity. In one embodiment, the Fc domains of the two chains are engineered to contain complementary mutations, also known as “knobs-into-holes”, to enhance the formation of the heterodimer. A hexaGNC antibody comprises 6 independent binding specificities to at least 6 antigens expressed by immune effector cells or target cancer cells. In comparison to conventional combination therapies, the classes of hexaGNC antibodies are designed for treating cancer as a single drug in order to improve efficacy and reduce manufacturing cost. In this way, the treatment simplifies clinical administration SOP, eases logistical concerns surrounding multi variate dosing, and becomes more affordable to patients.

[0078] The term “antibody” is used in the broadest sense and specifically covers single monoclonal antibodies (including agonist and antagonist antibodies), antibody compositions with polyepitopic specificity, as well as antibody fragments (e.g., Fab, F(ab′)₂, and Fv), so long as they exhibit the desired biological activity. In some embodiments, the antibody may be monoclonal, polyclonal, chimeric, scFv, bispecific or bi-effective, human and humanized antibodies as well as active fragments thereof. Examples of active fragments of molecules that bind to known antigens include Fab, F(ab′)₂, scFv and Fv fragments, including the products of an Fab immunoglobulin expression library and epitope-binding fragments of any of the antibodies and fragments mentioned above. In some embodiments, antibody may include immunoglobulin molecules and immunologically active portions of immunoglobulin molecules, i.e. molecules that contain a binding site that immunospecifically bind an antigen. The immunoglobulin can be of any type (IgG, IgM, IgD, IgE, IgA and IgY) or class (IgG1, IgG2, IgG3, IgG4, IgA1 and IgA2) or subclasses of immunoglobulin molecule. In one embodiment, the antibody may be whole antibodies and any antigen-binding fragment derived from the whole antibodies. A typical antibody refers to heterotetrameric protein comprising typically of two heavy (H) chains and two light (L) chains. Each heavy chain is comprised of a heavy chain variable domain (abbreviated as VH) and a heavy chain constant domain. Each light chain is comprised of a light chain variable domain (abbreviated as VL) and a light chain constant domain. The VH and VL regions can be further subdivided into domains of hypervariable complementarity determining regions (CDR), and more conserved regions called framework regions (FR). Each variable domain (either VH or VL) is typically composed of three CDRs and four FRs, arranged in the following order: FR1, CDR1, FR2, CDR2, FR3, CDR3, FR4 from amino-terminus to carboxy-terminus. Within the variable regions of the light and heavy chains there are binding regions that interacts with the antigen.

[0079] The term “monoclonal antibody” as used herein refers to an antibody obtained from a population of substantially homogeneous antibodies, i.e., the individual antibodies comprising the population are identical except for possible naturally occurring mutations that may be present in minor amounts. Monoclonal antibodies are highly specific, being directed against a single antigenic site. Furthermore, in contrast to conventional (polyclonal) antibody preparations which typically include different antibodies directed against different determinants (epitopes), each monoclonal antibody is directed against a single determinant on the antigen. In addition to their specificity, the monoclonal antibodies are advantageous in that they are synthesized by the hybridoma culture, uncontaminated by other immunoglobulins. The modifier “monoclonal” indicates the character of the antibody as being obtained from a substantially homogeneous population of antibodies and is not to be construed as requiring production of the antibody by any particular method. For example, the monoclonal antibodies to be used in accordance with the present disclosure may be made by the hybridoma method first described by Kohler & Milstein, Nature, 256:495 (1975), or may be made by recombinant DNA methods (see, e.g., U.S. Pat. No. 4,816,567).

[0080] The monoclonal antibodies may include “chimeric” antibodies (immunoglobulins) in which a portion of the heavy and/or light chain is identical with or homologous to corresponding sequences in antibodies derived from a particular species or belonging to a particular antibody class or subclass, while the remainder of the chain(s) is identical with or homologous to corresponding sequences in antibodies derived from another species or belonging to another antibody class or subclass, as well as fragments of such antibodies, so long as they exhibit the desired biological activity (U.S. Pat. No. 4,816,567; and Morrison et al., Proc. Natl. Acad. Sci. USA, 81:6851-6855 [1984]).

[0081] Monoclonal antibodies can be produced using various methods including mouse hybridoma or phage display (see Siegel. Transfus. Clin. Biol. 9:15-22 (2002) for a review) or from molecular cloning of antibodies directly from primary B cells (see Tiller. New Biotechnol. 28:453-7 (2011)). In the present disclosure some antibodies were created by the immunization of rabbits with both human PD-L1 protein and cells transiently expressing human PD-L1 on the cell surface. Rabbits are known to create antibodies of high affinity, diversity and specificity (Weber et al. Exp. Mol. Med. 49:e305). B cells from immunized animals were cultured in vitro and screened for the production of anti-PD-L1 antibodies. Besides immunization of rabbits followed by B cell culture, other common strategies for antibody generation and discovery include immunization of other animals (e.g., mice) followed by hybridoma and/or display on phage, yeast, or mammalian cells; or display using synthetic variable gene libraries. The antibody variable genes were isolated using recombinant DNA techniques and the resulting antibodies were expressed recombinantly and further screened for desired features such as ability to inhibit the binding of PD-L1 to PD-1, the ability to bind to non-human primate PD-L1 and the ability to enhance human T-cell activation. This general method of antibody discovery is similar to that described in Seeber et al. PLOS One. 9:e86184 (2014).

[0082] The term “antigen- or epitope-binding portion or fragment” refers to fragments of an antibody that are capable of binding to an antigen. These fragments may be capable of the antigen-binding function and additional functions of the intact antibody. Examples of binding fragments include, but are not limited to a single-chain Fv fragment (scFv) consisting of the VL and VH domains of a single arm of an antibody connected in a single polypeptide chain by a synthetic linker or a Fab fragment which is a monovalent fragment consisting of the VL, constant light (CL), VH and constant heavy 1 (CH1) domains. Antibody fragments are produced using conventional methods known to those skilled in the art. The antibody fragments are can be screened for utility using the same techniques employed with intact antibodies.

[0083] The “antigen- or epitope-binding fragments” can be derived from an antibody of the present disclosure by a number of art-known techniques. For example, purified monoclonal antibodies can be cleaved with an enzyme, such as pepsin, and subjected to HPLC gel filtration. The appropriate fraction containing Fab fragments can then be collected and concentrated by membrane filtration and the like. For further description of general techniques for the isolation of active fragments of antibodies, see for example, Khaw, B. A. et al. J. Nucl. Med. 23:1011-1019 (1982); Rousseaux et al. Methods Enzymology, 121:663-69, Academic Press, 1986.

[0084] Papain digestion of antibodies produces two identical antigen binding fragments, called “Fab” fragments, each with a single antigen binding site, and a residual “Fc” fragment, whose name reflects its ability to crystallize readily. Pepsin treatment yields an F(ab′)₂ fragment that has two antigen combining sites and is still capable of cross-linking antigen.

[0085] The Fab fragment may contain the constant domain of the light chain and the first constant domain (CH1) of the heavy chain. Fab′ fragments differ from Fab fragments by the addition of a few residues at the carboxy terminus of the heavy chain CH1 domain including one or more cysteines from the antibody hinge region. Fab′-SH is the designation herein for Fab′ in which the cysteine residue(s) of the constant domains bear a free thiol group. F(ab′)₂ antibody fragments originally were produced as pairs of Fab′ fragments which have hinge cysteines between them. Other, chemical couplings of antibody fragments are also known.

[0086] “Fv” is the minimum antibody fragment which contains a complete antigen recognition and binding site. This region consists of a dimer of one heavy and one light chain variable domain in tight, non-covalent association. It is in this configuration that the three CDRs of each variable domain interact to define an antigen binding site on the surface of the VH-VL dimer. Collectively, the six CDRs confer antigen binding specificity to the antibody.

[0087] The “light chains” of antibodies (immunoglobulins) from any vertebrate species can be assigned to one of two clearly distinct types, called kappa and lambda (λ), based on the amino acid sequences of their constant domains.

[0088] Depending on the amino acid sequence of the constant domain of their heavy chains, immunoglobulins can be assigned to different classes. There are five major classes of immunoglobulins: IgA, IgD, IgE, IgG and IgM, and several of these may be further divided into subclasses (isotypes), e.g., IgG-1, IgG-2, IgG-3, and IgG-4; IgA-1 and IgA-2. The heavy chain constant domains that correspond to the different classes of immunoglobulins are called α, delta, epsilon, γ, and μ, respectively. The subunit structures and three-dimensional configurations of different classes of immunoglobulins are well known.

[0089] A “humanized antibody” refers to a type of engineered antibody having its CDRs derived from a non-human donor immunoglobulin, the remaining immunoglobulin-derived parts of the molecule being derived from one (or more) human immunoglobulin(s). In addition, framework support residues may be altered to preserve binding affinity. Methods to obtain “humanized antibodies” are well known to those skilled in the art. (see, e.g., Queen et al., Proc. Natl Acad Sci USA, 86:10029-10032 (1989), Hodgson et al., Bio/Technology, 9:421 (1991)).

[0090] The terms “polypeptide”, “peptide”, and “protein”, as used herein, are interchangeable and are defined to mean a biomolecule composed of amino acids linked by a peptide bond.

[0091] The terms “a”, “an” and “the” as used herein are defined to mean “one or more” and include the plural unless the context is inappropriate.

[0092] By “isolated” is meant a biological molecule free from at least some of the components with which it naturally occurs. “Isolated,” when used to describe the various polypeptides disclosed herein, means a polypeptide that has been identified and separated and/or recovered from a cell or cell culture from which it was expressed. Ordinarily, an isolated polypeptide will be prepared by at least one purification step. An “isolated antibody,” refers to an antibody which is substantially free of other antibodies having different antigenic a binding specificity.

[0093] “Recombinant” means the antibodies are generated using recombinant nucleic acid techniques in exogeneous host cells.

[0094] The term “antigen” refers to an entity or fragment thereof which can induce an immune response in an organism, particularly an animal, more particularly a mammal including a human. The term includes immunogens and regions thereof responsible for antigenicity or antigenic determinants.

[0095] Also, as used herein, the term “immunogenic” refers to substances which elicit or enhance the production of antibodies, T-cells or other reactive immune cells directed against an immunogenic agent and contribute to an immune response in humans or animals. An immune response occurs when an individual produces sufficient antibodies, T-cells and other reactive immune cells against administered immunogenic compositions of the present disclosure to moderate or alleviate the disorder to be treated.

[0096] “Specific binding” or “specifically binds to” or is “specific for” a particular antigen or an epitope means binding that is measurably different from a non-specific interaction. Specific binding can be measured, for example, by determining binding of a molecule compared to binding of a control molecule, which generally is a molecule of similar structure that does not have binding activity. For example, specific binding can be determined by competition with a control molecule that is similar to the target.

[0097] The term “affinity” refers to a measure of the attraction between two polypeptides, such as antibody/antigen, receptor/ligand, etc. The intrinsic attraction between two polypeptides can be expressed as the binding affinity equilibrium dissociation constant (KD) of a particular interaction. A KD binding affinity constant can be measured, e.g., by Bio-Layer Interferometry, where KD is the ratio of kdis (the dissociation rate constant) to kon (the association rate constant), as KD=kdis/kon.

[0098] Specific binding for a particular antigen or an epitope can be exhibited, for example, by an antibody having a KD for an antigen or epitope of at least about 10⁻⁴ M, at least about 10⁻⁵ M, at least about 10⁻⁶ M, at least about 10⁻⁷ M, at least about 10⁻⁸ M, at least about 10⁻⁹ M, alternatively at least about 10⁻¹⁰ M, at least about 10⁻¹¹ M, at least about 10⁻¹² M, or greater, where KD refers to the equilibrium dissociation constant of a particular antibody-antigen interaction. Typically, an antibody that specifically binds an antigen will have a KD that is 20-, 50-, 100-, 500-, 1000-, 5,000-, 10,000- or more times greater for a control molecule relative to the antigen or epitope.

[0099] Also, specific binding for a particular antigen or an epitope can be exhibited, for example, by an antibody having a KA or Ka for an antigen or epitope of at least 20-, 50-, 100-, 500-, 1000-, 5,000-, 10,000- or more times greater for the epitope relative to a control, where KA or Ka refers to an association rate of a particular antibody-antigen interaction.

[0100] “Homology” between two sequences is determined by sequence identity. If two sequences which are to be compared with each other differ in length, sequence identity preferably relates to the percentage of the nucleotide residues of the shorter sequence which are identical with the nucleotide residues of the longer sequence. Sequence identity can be determined conventionally with the use of computer programs. The deviations appearing in the comparison between a given sequence and the above-described sequences of the disclosure may be caused for instance by addition, deletion, substitution, insertion or recombination.

[0101] The present disclosure may be understood more readily by reference to the following detailed description of specific embodiments and examples included herein. Although the present disclosure has been described with reference to specific details of certain embodiments thereof, it is not intended that such details should be regarded as limitations upon the scope of the disclosure.

### EXAMPLES

### Example 1. Methods and Assays

### Expression and Purification

[0102] DNA sequence encoding heavy and light chains was cloned into pTT5 vector from custom gene fragments using restriction cloning and/or Gibson assembly. Plasmid DNA was transfected transiently in ExpiCHO cells (Thermo A29133) according to manufacturer's instructions to generate multispecific GNC protein. Titers were measured after 7-9 days using ForteBio Octet instrument with protein A sensors.

[0103] GNC proteins were purified via protein A chromatography (Cytiva, 17549853), washing with phosphate-buffered saline (PBS), and eluting in 50 mM sodium acetate, pH 3.6, followed by immediate neutralization with 1/5 addition of 1M sodium acetate pH 7.0. Analytical size-exclusion chromatography (aSEC) was performed to assess protein quality following affinity purification. aSEC was performed using an Acquity Arc Waters with a XBridge BEH SEC 300 Å, 7.8×300 mm, 3.5 μm column. Proteins were further polished with a preparative SEC step using Superdex 200 Increase 10/300 GL column. All subsequent assays were performed with protein that was at least 90% protein of interest by aSEC.

### T-Cell Dependent Cytotoxicity Assay

[0104] T-cell dependent cytotoxicity (TDCC) assay is based on the methods outlined in Nazarian et al. (2014). Target cells from established cancer cell lines (ADCC) are first transduced with a luciferase expressing gene to generate luciferase positive target cells. These target cells are next grown in cell culture flasks and when an appropriate number have been expanded they are lifted, counted and replated into 384 well (Corning 3570) at an appropriate density depending on previous growth characteristics, using a BioTek EL406 liquid dispenser. For adherent cell lines the cells are allowed to adhere to the plates overnight in a CO2 controlled jacketed tissue culture incubator. Next, either PBMC or previously expanded T-cells (dynabeads) are plated at an appropriate effector to target ratio, frequently 5:1, and the plate is dosed with a dilution series of the test T-cell targeting agent. Test article experiments are conducted in quadruplicate as the 96 well dilution block is stamped into 384 well quadrants robotically (Opentrons OT-2 liquid handling robot). The TDCC assay plate is incubated for 72-96 hours. Readout of the cell viability curve is accomplished by the use of the Promega Bright-glo luciferase assay kit. Briefly, 20 uL are added to the TDCC assay plate and incubated for ^{˜}15 min before measuring the resultant luminescence on a BMG Clariostar plate reader. Killing curves and EC50 values are analyzed and plotted in GraphPad Software.

### SEC-MALS

[0105] Analytical size exclusion chromatography (SEC) in combination with multi-angle light scattering (MALS) and absorbance (UV) and/or refractive index (RI) concentration detectors. SEC-MALS is typically employed during analytical characterization and early phase clinical trials of antibody to support FDA IND submission. Our size exclusion is performed using an Acquity Arc Waters with a XBridge BEH SEC 300 Å, 7.8×300 mm, 3.5 μm column. The MALS component uses Wyatt miniDAWN TREOS/Optilab T-rEX systems. The molecular weight may be determined from a measurement of the change, Δn, of the solution's refractive index n with the molecular concentration change, Δc, by measuring the dn/dc (=Δn/Δc) value using an Optilab T-rEX differential refractometer. The intensity of light scattered by a molecule, measured by means of a miniDAWN TREOS multi-angle light scattering (MALS) detector, is directly proportional to the molar mass.

### OCTET

[0106] ForteBio Octet platform applies Bio-Layer Interferometry (BLI) as a label-free technology for measuring protein-protein interactions. It is an optical analytical technique that analyzes the interference pattern of white light reflected from two surfaces: a layer of immobilized protein on the biosensor tip, and an internal reference layer. Any change in the number of molecules bound to the biosensor tip causes a shift in the interference pattern that can be measured in real-time. In this method, the binding between an antibody immobilized on the Anti-human IgG Fc Capture (AHC) Biosensors tip surface and an antigen in solution produces an increase in optical thickness at the biosensor tip, which results in a wavelength shift, Δλ, directly reflecting the change in thickness of the biological layer. The interaction of these two molecules are measured in real time, providing the ability to monitor binding specificity, rates of association and dissociation, or concentration, with precision and accuracy. Unbound molecules, changes in the refractive index of the surrounding medium, or changes in flow rate do not affect the interference pattern. Facile analysis of the binding of GNC proteins to targeted antigens can be performed on the Octet system, using AHC tips to immobilize the GNC protein, and using purified antigen as analyte either as a single concentration (e.g., 100 nM) or a series of concentrations (e.g., seven 1:2 serial dilutions starting at 200 nM).

### Tm by Dynamic Light Scattering (DLS)

[0107] The hydrodynamic radius (Rh) of antibody samples (1 mg/ml) was measured by using a DynaPro Plate Reader (Wyatt Technology, Santa Barbara, Calif.) from 25° C. to 75° C. in 1° C. increments with ramp rate of 0.26° C./min. A total of 3 acquisitions of 5 s were collected at each temperature. DYNAMICS 7.8.1.3 software (Wyatt Technologies) was used to calculate the radius and the onset temperature at which Rh begins to change significantly and the midpoint of the transition curve (Tm).

Quantitative Flow Cytometry (qFACS)

[0108] CountBright absolute counting beads (Thermo C36950) were used for calibration, and primary antibodies panitumumab (EGFR), anti-HER3 from MM111 (HER3), PL221G5 (PD-L1), TF 3H8-1 (CEA), and trastuzumab (HER2) were used to quantify the corresponding receptor number on various tumor cell lines, as described previously (Wang L et al. Curr Protoc. Cytom. 2016).

### Example 2. GNC Antibodies Having NKG2D as One of Binding Domains

[0109] NKG2D is a major recognition receptor for the detection and elimination of transformed and infected cells as its ligands are induced during cellular stress, either as a result of infection or genomic stress such as in cancer. In humans, NKG2D is encoded by KLRK1 gene which is located in the NK-gene complex (NKC), it is expressed by NK cells, γδ T cells, and CD8⁺ αβ T cells. Human NKG2D receptor complex assembles into a hexameric structure, while NKG2D itself forms a homodimer whose ectodomains serve for ligand binding. In NK cells, NKG2D serves as an activating receptor, which itself is able to trigger cytotoxicity. The function of NKG2D on CD8⁺ T cells is to send co-stimulatory signals to activate them. The major histocompatibility complex class I polypeptide-related sequence A gene (MICA) encodes a membrane-bound protein acting as a ligand to stimulate an activating receptor, NKG2D, expressed on the surface of essentially all human natural killer (NK), γδ T and CD8⁺ αβ T cells. MICA protein is absent from most cells but can be induced by infections and oncogenic transformation and is frequently expressed in epithelial tumors. Upon binding to MICA, NKG2D activates cytolytic responses of NK and γδ T cells against infected and tumor cells expressing MICA. Therefore, membrane-bound MICA acts as a signal during the early immune response against infection or spontaneously arising tumors. On the other hand, human tumor cells spontaneously release a soluble form of MICA, causing the downregulation of NKG2D and in turn severe impairment of the antitumor immune response of NK and CD8⁺ T cells. This is considered to promote tumor immune evasion and also to compromise host resistance to infections, which may be neutralized by free NKG2D. In this context and by the definition of GNC proteins, NKG2D is one of cytotoxic cell binding moieties (from Applicant's application No. PCT/US2018/039160, incorporated herein in its entirety).

[0110] The GNC antibodies having NKG2D ligand binding specificity comprise a common core antibody domain, the Fc region of which can either have or be devoid of effector function. The tetraGNC antibodies having NKG2D dimer as one of binding domain on the heavy chain (HC) have been generated (Table 1). These antibodies had either 2 additional scFv domains, including the binding domain to 4-1BB, a TNF superfamily receptor normally expressed on activated T cells (SI-49E1, SI-49E2, SI-49E3, SI-49E4, Table 1), or 1 additional scFv plus 41BBL (trimer form), which is normally found on antigen-presenting cells (APCs) and binds to 4-1BB (SI-49E11, SI-49E12, SI-49E13, Table 1). The four binding domains (D1 through D4) were fused through G/S linker regions and expressed as a single heavy chain (HC or Chain A or Chain 1). By definition as shown in FIG. 1, these types of tetraGNC antibodies are characterized by having one of the scFvs (D1) located at the N-terminus of the VH domain (D2 or Fab) and two scFvs attached in succession to the Fc region (D3 and D4), whereas the light chain (LC) comprises only the VL domain (D2 or Fab) in natural configuration. To produce pentaGNC antibodies having NKG2D binding specificity, one strategy is to engineer an additional NKG2D tandem repeat homodimer at either N (D6) or C (D5) terminus of LC (FIG. 1). Five D5-pentaGNC antibodies with NKG2D dimer as a binding domain from LC were generated (SI-49P1, SI-49P2, SI-49P3, SI-49P4, and SI-49P5, Table 2). The characteristic feature of these D5-pentaGNC antibodies is a single cancer-targeting moiety (D2) in combination with 4 cytotoxic binding moieties, namely, anti-CD3, anti-PD-L1, anti-4-1BB, and NKG2D. Table 3 listed the information of both exemplary cancer-targeting moieties and cytotoxic binding moieties as independent binding domains. By the definition, PD-L1 is not classified as a cancer-targeting moiety even though it is expressed on cancer cells as an immune checkpoint marker. While these D5-pentaGNC antibodies consist of a core antibody binding domain with additional 3 scFv binding regions on HC and one NKG2D tandem repeat homodimer on LC for a total of 5 different specificities, the configuration may be diversified. For example, the pentaGNC antibodies may have a core antibody binding domain with an additional 2 scFv binding regions plus one TNF superfamily (trimer form) domain, and one NKG2D tandem repeat homodimer for a total of 5 different specificities. Because NKG2D and 41BBL are not typical antigen binding domain structure, i.e. either Fab or scFv, such GNC antibodies with a Fab at the core may be called GNC molecules or GNC proteins elsewhere with the same meaning. In addition, the domain structures may be engineered for stabilizing those multi-specific GNC proteins. For example, each scFv domain may have both, a stapled by a disulphide bond at vL100 and vH44 and a not stapled, variants to be selected for stabilizing the overall structure.

[0111] Analytical SEC shows the stability and high quality of purified tetraGNC antibodies comprising NKG2D receptor and 41BBL (FIG. 2A-2C), and several D5-pentaGNC having NKG2D binding specificity from LC (2D), including SI-49E1, SI-49E2, SI-49E3, SI-49E4, SI-49E11, SI-49E12, SI-49E13, SI-49P1, SI-49P2, SI-49P3, and SI-49P4. The results demonstrated that these atypical GNC antibodies can be readily purified and remain stable.

### Example 3. Comparative Potency of GNC Antibodies Having NKG2D as One of Binding Domains

[0112] In NK cells, NKG2D serves as an activating receptor, which itself can trigger cytotoxicity, whereas on CD8⁺ T cells the function of NKG2D is to send co-stimulatory signals to activate them. NKG2D forms a homodimer whose ectodomains serve for ligand binding. This feature qualifies NKG2D as a non-variable-sequence-based binding domain in a GNC format and other binding domains can be added to create a class of multispecific NKG2D-GNC protein. In one GNC format, individual NKG2D monomer was incorporated in the D2 position on heavy chain and light chain which formed a dimeric NKG2D receptor on HC/LC dimerization. Thus, NKG2D can act as a receptor for the multi-specific antibody-like protein GNC molecule to bind its ligand. In other GNC format, a NKG2D tandem repeat was designed by adding a (GxSy)n linker between individual NKG2D monomers which homodimerizes and forms a functional dimeric receptor. This NKG2D tandem dimeric structure can be positioned in D1, D3, D4, D5, or D6.

[0113] To evaluate the effect of NKG2D position in tetraGNC antibodies, SI-49E1, SI-49E2, SI-49E3, SI-49E4 were used for TDCC assay (FIG. 3). Using MDA-MB-231 cell line expressing MICA all 4 NKG2D tetraGNC antibodies showed higher potency than the control antibodies of SI-49X1, a bispecific NKG2D-αCD3-Fc antibody, and SI-49X2, a bispecific Fc-αCD3-NKG2D antibody, both of which lack anti-PD-L1 and anti-4-1BB scFv. The result indicates that the binding specificity to PD-L1 and/or 4-1BB contributes to the toxicity. The minor differences among the 4 NKG2D tetraGNC antibodies could be significant reflecting the differences in their configuration and accessibility to immune cells.

[0114] To evaluate the effect of NKG2D position in pentaGNC antibodies, SI-49P1, SI-49P2, SI-49P3, SI-49P4, and SI-49P5 (Table 2) were used for TDCC assay (FIG. 4). SI-49P1, a NKG2D-αMSLN pentaGNC antibody shows cell killing with higher potency than both tetraGNC control antibodies, SI-51E4 and SI-51E1, and NKG2D-αMesothelin (αMSLN) control antibody, SI-51X1. This observation supports the inclination that the addition and position of NKG2D to tetraGNC antibodies improves potency. The fact that a control antibody, SI-51X1, which is a tri-specific αNKG2D-LC/αCD3-αMSLN-Fc without αPD-L1 and α4-1BB, is less potent indicates that both αPD-L1 and α4-1BB domains may enhance the toxicity. The potency of cell killing is powered by pentaGNC>tetraGNC>pentaGNC control antibodies.

[0115] To quantify the ability of NKG2D receptor domain dimer to redirect T cells to kill MICA-bearing tumor cells in the context of tetraGNC or pentaGNC antibodies, TDCC assay with MDA-MB-231 target cells was performed. Test articles included a control tetraGNC (SI-38E72, αCD3×αFITC×αPD-L1×α4-1BB) with negative control anti-FITC domain at D2, tetraGNC antibodies (SI-49E1, SI-49E2, SI-49E3, SI-49E4, NKG2D×αCD3×αPD-L1×α4-1BB) with binding domains at different GNC positions, and pentaGNC (SI-49P1, αCD3×αMSLN×αPD-L1×α4-1BB×NKG2D) with additional αMSLN binding domain. The effector:target cell ratio (E:T) was 5:1, and the purified T cells, target cells, and drug dilutions were incubated for 96 hours before reading luminescence, representative of remaining tumor cells. Note that some experiments were performed on different days, and the absolute EC50 value may vary. Nevertheless, the results in Table 4 show that all tetraGNC antibodies containing the NKG2D domain had significantly higher potency of TDCC than the corresponding tetraGNC without NKG2D (SI-38E72), ranged from about 10-fold (SI-49E2) to more than 130-fold (SI-49E4). While the differences among these tetraGNC antibodies may be attributed to configuration of the same group of 4 bind domains, the addition of anti-TAA moiety significantly increased the potency of SI-49P1, a pentaGNC antibody, by more than 600-fold. Thus, adding one cytotoxic binding moiety, such as NKG2D, may improve the potency, and adding an anti-TAA binding moiety can specifically increase potency of T cell-mediated tumor cell killing.

### Example 4. Mutation to Remove Light Chain Contaminants

[0116] Antibody-based proteins are most often purified via protein A affinity chromatography, where the protein A resin captures the antibody at a binding site at the C_{H2}-C_{H3} interface in the Fc domain. However, protein A also binds to the V_{H} domain domain of V_{H3} family Fvs. For most antibody-based platforms this is not a problem, since V_{H} domains are generally on the heavy chain. However, when scFvs containing V_{H3} are attached to the light chain, the V_{H} domain can bind to protein A resin during purification, causing light chain monomers and dimers to contaminate the desired heavy-light chain heterotetramer. Thus, a potential hurdle when producing multi-specific antibodies containing any V_{H3} domain on the light chain is the presence of additional contaminants in the protein A elution. This is especially problematic when the light chain expresses more efficiently than the heavy chain, causing an abundance of light chain contaminants to be purified along with the desired protein assembly.

[0117] In order to rationally disrupt protein A binding of V_{H3} family members, a structural approach was taken to interrupt the binding interface. Crystal structure 1DEE (Graille M. et al. Proc. Nat. Acad. Sci. 2000.) showed that residue R19 in V_{H3} (Kabat numbering) is in direct contact with two side chains of protein A domain D. In particular, contact with Q32 and D36 could be eliminated to significantly weaken the interaction. Thus, R19 was mutated to serine, which does not form these interactions due to its shorter side-chain. Additionally, S19 exists naturally in other V_{H} family members, suggesting that it may be less immunogenic than other substitutions. The mutation R19S (Kabat numbering) was incorporated into the FR1 region of the V_{H} domain for V_{H3}-containing scFvs on the GNC light chain. Specifically, the hexa-GNC antibody, SI-55-H11, harbored R19S mutation in its light chain sequences encoding the anti-HER3 scFv domain at D5 and the anti-CD19 scFv at domain 6. The residue of interest is at the protein A binding interface, and therefore mutation of R to S disrupts the interaction with protein A. Elimination of protein A binding in light chain scFvs prevents light chain monomers and dimers from binding to protein A during purification. As a result, a more homogeneous product without light chain contaminants can be obtained. For hexa-GNC, which may contain up to two V_{H3} scFvs per light chain, this mutation is especially important in allowing efficient purification of the desired product.

### Example 5. Comparative Potency of Multi-Specific GNC Antibodies with Diverse Structures of Binding Domains

[0118] In a general scheme of multi-specific GNC proteins (FIG. 1), each binding domain of multi-specific GNC antibodies may be variable sequence-based Fab, scFv, or non-variable sequence-based ligand, receptor, or other binding structure. To evaluate how the structural diversity of each binding domain may affect the overall functionality of multi-specific GNC antibodies, TDCC assay was performed to elicit T cell-mediated killing of pancreatic cancer cells (BxPC3). As listed in Table 5, 3 pentaGNC antibodies (SI-1P1, SI-55P9, and SI-55P10) and 1 hexaGNC antibodies (SI-55H11) were used to assess the variation of binding specificity to EGFR, HER3, CD19, CD3, and 4-1BB. All test articles included αPD-L1 scFv at positions D3 without variation in either its position or structure. For the binding specificity to EGFR, the variation included positions (D1 vs D2). For the binding, the variation included both structures (stapled vs not stapled) and positions (D1 vs D2). For the binding specificity to 4-1BB, the variation included both structures and binding mechanisms (variable sequence-based scFv vs non-variable sequence-based ligand-receptor interaction via 41BBL, i.e. 4-1BB ligand trimer to 4-1BB receptor). For the binding specificity to CD19, the variation was related humanized variable sequences. And for the binding specificity to HER3, the difference aided to this group as either tetraGNC, pentaGNC, or hexaGNC antibodies, since HER3 was not detectable on the surface of BXPC3 cells see Table 9).

[0119] The TDCC assay was set under the same conditions, such as the Effector:Target cell ratio (E:T) was 5:1, and the purified T cells, target cells, and drug dilutions were incubated for 72 hours before reading luminescence, representative of remaining tumor cells. Note that some experiments were performed on different days, the EC50 values may vary from one experiment to the other within an error margin. Nevertheless, the potency of these pentaGNC and hexaGNC antibodies were under 1 pM and within a ten-fold range, indicating the structural variations may improve manufacturing cost and feasibility more significantly than the efficacy of killing BXPC3 cells. In this context, the composition of binding specificity remains to be the determining factor for creating multi-specific GNC antibodies targeting specific forms of cancer.

### Example 6. Composition of Moiety 1 and Moiety 2 for Multi-Specific GNC Antibodies

[0120] With the capacity of up to six binding specificities, multi-specific GNC antibodies may become antibody therapy with the highest potency of killing cancer cells, for example, the value of EC50 may be down to the range of pM or even fM from nM. A successful and highly efficacious multi-specific GNC antibody depends on the composition of both moiety 1 and moiety 2 antigens. Table 4 established the comparative potency of four moiety 1 binding specificities (i.e. αCD3, αPD-L1, α4-1BB, and NKG2D) in tetraGNC antibodies in TDCC assay using MDA-MB-231 cells as target breast cancer cells. As compared to the control antibody (SI-38E72) comprising a trio of moiety 1 binding domains (i.e. αCD3, αPD-L1, and α4-1BB as D1, D3, and D4 of HC, respectively), the addition of fourth moiety 1 binding domain, a non-variable sequence-based NKG2D dimer receptor improved the potency by about 10- to 130-fold depending the configurations. However, the addition of an anti-TAA moiety significantly increased the potency of the pentaGNC antibody (SI-55H11) up to 600-fold.

[0121] To evaluate the moiety 1 binding specificity in combination with the trio moiety 1 binding domains, TDCC assay was performed using the breast cancer cell line MDA-MB-231 as target cells. All test articles included αCD3, αPD-L1, and α-4-1BB scFvs at positions D1, D3 and D4, respectively. The tetraGNC antibody (SI-38E72) was used as a control for the absence of moiety 1 binding domain, with α-FITC domain at D2 which is not specific for any tumor antigen. Other tetraGNC test articles contained various binding domains at D2 (SI-55E: αEGFR Cetuximab; SI-55E2: αEGFR Panitumumab; SI-50E1: αHER2 Trastuzumab; and SI-51E1: αMesothelin Amatuximab), and the pentaGNC antibody (SI-1P1) contained αEGFR Cetuximab at D2 and αHER3 MM111 scFv at D5. The effector:target cell ratio (E:T) was 5:1 or 10:1, and the purified T cells, target cells, and drug dilutions were incubated for 96 hours before reading luminescence, representative of remaining tumor cells. Note that some experiments were performed on different days, the EC50 values might vary but were within an error margin. Nevertheless, the results demonstrate that all GNC antibodies containing an αTAA domain at D2 elicited significantly (20- to 100-fold) more potent TDCC than the control with αFITC at D2 (Table 6). The EC50 for the pentaGNC antibody (SI-1P1) was similar to that for the tetraGNCs, indicating that domains can be added to increase TAA selectivity while still retaining potent TDCC.

### Example 7. Screening TAAs Using tetraGNC Configuration with a Trio of Moiety 1 Binding

[0122] The configuration of the trio of moiety 1 binding domains being fixed at D1, D3, and D4 (Table 6) may be used as a backbone HC to accurately identify new and/or effective moiety 2 binding domains of TAAs. To assess the ability of multi-specific GNC antibodies targeting different tumor antigens to elicit T cell-mediated killing, TDCC assay was performed using the cervical cancer cell line HeLa as target cells. All test articles included αCD3, αPD-L1, and α4-1BB scFvs at positions D1, D3 and D4, respectively, and tetraGNC antibody (SI-38E72) was used as a control for having αFITC domain at D2 which is not specific for any tumor antigen. Other tetraGNC test articles contained various binding domains at D2 as listed in Table 7. The effector:target cell ratio (E:T) was 10:1, and the purified T cells, target cells, and drug dilutions were incubated for 96 hours before reading luminescence, representative of remaining tumor cells. Note that some experiments were performed on different days, so that the EC50 values may vary but were in an error margin. Nevertheless, the result from the same day experiment show that the two anti-EGFR tetraGNC antibodies, SI-55E1 (Cet) and SI-55E2 (Pan), killed more than 50% of cancer cells with a potency at 13 and 9 pM, respectively (FIG. 5). Other test articles (SI-51E1, SI-52E1, SI-50E2, SI-54E1, SI-55E3, SI-56E1, SI-57E1, and SI-38E17) exerted weak killing of less than 20% of seeded cells. Therefore, their EC50 values were not comparable to that of SI-55E1 and SI-55E2. SI-55E3 carried an anti-EGFR binding domain at D2 or Fab adopted from Nimotuzumab, whose binding affinity to EGFR is lower than that of Panitumumab for SI-55E1 and Cetuximab for SI-55E2 (from Applicant's application No. PCT/US2020/059230, incorporated herein in its entirety). Surprisingly, SI-55E3 was among those exhibiting weak killing. This finding indicates that both binding specificity and affinity play roles in multi-specific GNC antibody-mediated TDCC.

### Example 8. Comparative Potency of the Same Multi-Specific GNC Antibody Killing Different Cancer Cells

[0123] To further characterize the comparative potency of SI-55E1 and SI-55E2 having the same configuration of moiety 1 binding domains and targeting EGFR, MDA-MB-231 cell line was used in TDCC assay. In the same day experiment, two additional antibodies targeting both EGFR and HER3 were used: SI-1P2 is a pentaGNC antibody having the same configuration of moiety 1 binding domains as that of SI-55E1 and SI-55E2 plus an additional moiety 2 domain binding to HER3, and SI-1 is a bispecific antibody against both EGFR and HER3 in the absence of any moiety 1 binding domain. The materials and methods of this TDCC assay were the same as described in Example 1. As shown in FIG. 6, SI-55E1, SI-55E2, and SI-1P2 exerted comparable potency demonstrated by the overlapping dose-viability curves, and their EC50 values were calculated in the range of 17-29 fM (Table 6). In contrast, SI-1 did not reveal any response below the dose in nM in this same day experiment. This result supported the notion that a trio of moiety 1 binding domains (CD3, PD-L1, and 4-1BB) contributes significantly to the potency of multi-specific GNC antibodies.

[0124] To measure the added effect of moiety 1 binding domain, such as anti-CD3, two tetraGNC antibodies (SI-50E1 and SI-50E6) and one biGNC antibody (SI-50X1) were analyzed in TDCC assay using MDA-MB-231 cell line as target cells. All three antibodies have the same binding specificity to HER2 derived from Trastuzumab (Table 6). SI-50E1 and SI-50E6 have the same configuration of moiety 1 and moiety 2 binding domains, however, the scFv domains of SI-50E6 were engineered with additional disulfide bonds for added stability (i.e. stapled) whereas the scFv domains of SI-50E1 was not stapled. SI-50X1 is a bispecific antibody targeting CD3 and HER2. The TDCC dose-response curves clearly showed that all three GNC antibodies are potent and their EC 50 values were in the range of fM (FIG. 7). The difference in the curves and EC values was due to the absence or the presence of the moiety 2 binding domains to PD-L1 and 4-1BB among the three antibodies.

### Example 9. Selecting TAAs and Assembling Moiety 2 Binding Domains for Multi-Specific GNC Antibodies

[0125] Antibody therapy employs a wide variety of strategy to kill cancer cells either directly or indirectly, and both mechanisms of action depend on binding to surface antigen(s). On the other hand, the cancer cells are evolved to gain their ability of escaping such recognitions, either from the antibody, immune cells, or both. With the capacity of up to six binding specificities, multi-specific GNC antibodies displayed the highest potency as measured by the in vitro EC50 in the range of pM and fM. A highly efficacious multi-specific GNC antibody depends on the composition of both moiety 1 and moiety 2 antigens. Herein, the trio of moiety 1 binding domains (CD3, PD-L1, and 4-1BB) in a configuration (D1, D3, and D4 of HC, respectively) provides the backbone of multi-specific GNC antibodies. Such formatted GNC antibodies allow selecting, screening, and optimizing TAAs of target cancer cells (FIG. 8).

[0126] To demonstrate the importance of TAA surface expression profile, quantitative flow cytometry (qFACS) was performed to quantify the approximate number of receptors per cell for various tumor targets. EGFR, HER2, and HER3 are members of the EGFR family whose expression is often upregulated by solid tumors, and PD-L1 is the target for inhibiting the immune checkpoint signaling utilized by a portion of human cancer. Nonetheless, the surface expression of HER3 and PD-L1 was not detectable in MDA-MB-232 cells and Hela cells, respectively (Table 8). The observation may provide an explanation for lacking a synthetic lethal effect when targeting both EGFR and HER3 by SI-1P1 as compared to SI-55E1, SI-55E2, and SI-50E1 (Table 6), each of which targets either EGFR or HER2. It may also explain that the failure of inducing TDCC by control antibody (SI-38E72) is likely due to the absence of PD-L1 on Hela cells (Table 7). In light of evolving and dynamic expression profile of cancer cells, any candidate antibody may be tested for TDCC using different types of cancer cells, such as those shown in Table 9.

[0127] To screen for TAAs, a modular cloning platform may be used to efficiently identify TAAs or epitopes of TAAs for assembling moiety 2 binding domains for multi-specific GNC antibodies. For example, TAA-Fc tetraGNC-1 and TAA-Fc tetraGNC-2 are two groups of tetraGNC antibodies with the pair-wise identical binding specificities. The only difference is that all TAA-Fc tetraGNC-2 antibodies have stapled scFv domain D1, D3, and D4 (mutations of VH 44->C, and VL 100->C) of HC. In this case, HC was swapped to produce two groups of tetraGNC antibodies. In another examples, LC may be swapped to produce multi-specific GNC antibodies with an added binding domain to TAA, such as SI-55P10 to SI-55H11, and SI-55E1 to SI-1P1. This modular cloning platform allows efficient assembly of multi-specific GNC antibodies with up to 3 TAAs starting from a single anti-TAA monoclonal antibody.

### Example 10. Functionality of Multi-Specific GNC Proteins with Receptor in the D2 Position

[0128] To further validate the flexibility of the GNC platform to accommodate diverse binding domains in each molecular position, a panel of proteins was generated with the NKG2D receptor at the D2 position (Table 10). When monomeric NKG2D is incorporated into the D2 position of both GNC chains, it was predicted that the NKG2D monomers would dimerize upon chain association. SI-49R21 is a monospecific GNC (antibody-like protein) with NKG2D receptor in place of the antibody VH/VL domains. SI-49R22 contains the same format, except that its Fc domain also contains knobs-into-holes mutations (chain A: T366S/L368A/Y407V; and chain B: T366W) for heterodimerization. SI-49R23 is a monospecific protein with NKG2D directly fused to the antibody Fc domain, and SI-49R24 contains this same structure but additionally has knobs-into-holes mutations in the Fc. SI-49R19 is a bispecific GNC with anti-CD3 scFv in D1 and NKG2D in D2, and SI-49R18 is a tri-specific GNC which additionally contains anti-CD19 at D6. SI-49E15 contains anti-CD3 scFv at D1, NKG2D at D2, anti-PD-L1 scFv at D3, and anti-4-1BB scFv at D4; SI-49P6 contains the same domains as SI-49E15, and additionally contains anti-CD19 scFv at D6. SI-49P7 has the same structure as SI-49P6, except it contains 4-1BB ligand trimer at D4 instead of anti 1BB scFv.

[0129] All the proteins with NKG2D in D2 were successfully expressed and purified. To validate functionality of the NKG2D receptor in the D2 position, Octet binding was performed. GNC protein was loaded onto AHC sensors at 5 ug/ml, and subsequently bound to 1:2 serial dilutions (top concentration 100 nM) of human MICA (Acro, MIA-H5221). The binding affinities (KD values) resulting from global fit to a 1:1 binding model are shown in Table 11. Mono-, bi-, tri-, tetra-, and penta-GNC proteins with NKG2D at D2 were shown to retain strong binding to the NKG2D ligand MICA, as demonstrated by KD values under 20 nM.

### Example 11. Antigen Binding Independent of GNC Position, Humanization, or Domain Format

[0130] To further demonstrate the adaptability of the GNC platform, a panel hexa-specific GNC proteins targeting the same antigens (CD3×EGFR×PD-L1×4-1BB×CD19×HER3) was generated. The entire panel contained anti-PD-L1 scFv at D3, anti-4-1BB scFv at D4, anti-HER3 scFv at D5, and anti-CD19 scFv at D6. Two molecules (SI-77H4 and SI-77H5) contained an anti-CD3 scFv at D1 and anti-EGFR Fab at D2, the difference being that the anti-EGFR domain for SI-77H4 was humanized while that of SI-77H5 retained mouse sequences. Two molecules (SI-55H11 and SI-55H12) contained anti-EGFR scFv at D1 and anti-CD3 Fab at D2, the difference being that the D2 VH/VL contained a disulfide staple in SI-55H11 (VH-44C, VL-100C) but not in SI-55H12. Thus, the panel allowed for clarification of whether D1/D2 positioning affected either protein expression properties or binding affinity to the targeted tumor-associated antigen.

[0131] Proteins were expressed transiently in ExpiCHO cells as described in Example 1. After approximately 8 days, GNC titers were measured using protein A sensors on the Octet platform (Table 12). Results demonstrate that the hexa-specific GNC proteins expressed well (≥30 μg/ml) regardless of the positioning and format of the anti-EGFR and anti-CD3 domains. After the first protein A purification step, all proteins had similarly low levels of aggregation with the percent protein of interest ranging from 72 to 85% (Table 12). Next, the affinity of the anti-EGFR domains for human EGFR was assessed by loading GNC proteins onto AHC sensors and using a single concentration (100 nM) of His-tagged human EGFR (expressed in-house) as the analyte. As shown in Table 12, the positioning and format of anti-EGFR and anti-CD3 domains did not significantly affect EGFR binding affinity (KD values within approximately 2-fold). Thus, GNC proteins retain full functionality regardless of the positioning of anti-TAA and anti-CD3 domains between D1 and D2.

### TABLES

TABLE 1
The generation and characterization of a class of tetra-specific GNC (tetraGNC)
antibodies with added binding domains and Fab domain (D1 to D4) on the heavy chain (HC).
NKG2D in D1, D3, D4, D5, and D6 is used as a dimerizing tandem repeat, while NKG2D in D2 is a
monomer that dimerizes upon chain association.

| | | | | |
|---|---|---|---|---|
| SEQ. ID | D1 | D2 | D3 | D4 |

tetraGNC having NKG2D dimer as one of binding domain on HC

| | | | | | |
|---|---|---|---|---|---|
| SI-49E1 | 1-4 | NKG2D-dimer | αCD3 | αPD-L1 | α4-1BB |
| SI-49E2 | 5-8 | NKG2D-dimer | αCD3 | α4-1BB | αPD-L1 |
| SI-49E3 | 9-12 | α4-1BB | αPD-L1 | αCD3 | NKG2D-dimer |
| SI-49E4 | 13-16 | αPD-L1 | α4-1BB | αCD3 | NKG2D-dimer |
| SI-49E11 | 17-20 | NKG2D-dimer | αCD3 | αPD-L1 | 41BBL |
| SI-49E12 | 21-24 | NKG2D-dimer | αCD3 | 41BBL | αPD-L1 |
| SI-49E13 | 25-28 | 41BBL | αPD-L1 | αCD3 | NKG2D-dimer |

TAA-Fab tetraGNC-1

| | | | | | |
|---|---|---|---|---|---|
| SI-50E1 | 109-112 | αCD3 | Tras | αPD-L1 | α4-1BB |
| SI-50E2 | 115-118 | αCD3 | PERT | αPD-L1 | α4-1BB |
| SI-51E1 | 121-124 | αCD3 | αMSLN | αPD-L1 | α4-1BB |
| SI-52E1 | 127-130 | αCD3 | αGD2 | αPD-L1 | α4-1BB |
| SI-53E1 | 133-136 | αCD3 | αClaudin | αPD-L1 | α4-1BB |
| SI-54E1 | 139-142 | αCD3 | Ritu | αPD-L1 | α4-1BB |
| SI-55E1 | 145-148 | αCD3 | Cet | αPD-L1 | α4-1BB |
| SI-55E2 | 151-154 | αCD3 | Pan | αPD-L1 | α4-1BB |
| SI-55E3 | 157-160 | αCD3 | Nimo | αPD-L1 | α4-1BB |
| SI-56E1 | 163-166 | αCD3 | αCD22 | αPD-L1 | α4-1BB |
| SI-57E1 | 169-172 | αCD3 | αCD30 | αPD-L1 | α4-1BB |

TAA-Fab tetraGNC-2 D1, D3, D4 are stapled)

| | | | | | |
|---|---|---|---|---|---|
| SI-50E6 | 111-114 | αCD3 | Tras | αPD-L1 | α4-1BB |
| SI-50E7 | 117-120 | αCD3 | PERT | αPD-L1 | α4-1BB |
| SI-51E4 | 123-126 | αCD3 | αMSLN | αPD-L1 | α4-1BB |
| SI-52E4 | 129-132 | αCD3 | αGD2 | αPD-L1 | α4-1BB |
| SI-53E3 | 135-138 | αCD3 | αClaudin | αPD-L1 | α4-1BB |
| SI-54E3 | 141-144 | αCD3 | Ritu | αPD-L1 | α4-1BB |
| SI-55E8 | 147-150 | αCD3 | Cet | αPD-L1 | α4-1BB |
| SI-55E9 | 153-156 | αCD3 | Pan | αPD-L1 | α4-1BB |
| SI-55E10 | 159-162 | αCD3 | Nimo | αPD-L1 | α4-1BB |
| SI-56E3 | 165-168 | αCD3 | αCD22 | αPD-L1 | α4-1BB |
| SI-57E3 | 171-174 | αCD3 | αCD30 | αPD-L1 | α4-1BB |

TABLE 2
The generation and characterization of penta- and hexa-specific GNC (pentaGNC
and hexaGNC) antibodies, including their sequence identification numbers
(SEQ ID), the binding specificity of each domain, from D1 to D6.

| | | | | | | |
|---|---|---|---|---|---|---|
| SEQ. ID | D1 | D2 | D3 | D4 | D5 | D6 |

D5-pentaGNC

| | | | | | | | |
|---|---|---|---|---|---|---|---|
| SI-1P1 | 33-36 | αCD3 | Cet | αPD-L1 | α4-1BB | MM-111 | n/a |
| SI-1P2 | 37-40 | αCD3 | Cet | αPD-L1 | α4-1BB | MM-111 | n/a |
| SI-1P4 | 41-44 | αCD3 | Pan | αPD-L1 | α4-1BB | MM-111 | n/a |
| SI-39P1 | 45-48 | αCD3 | αVIII | αPD-L1 | α4-1BB | MM-111 | n/a |

D5-pentaGNC

| | | | | | | | |
|---|---|---|---|---|---|---|---|
| SI-38P5 | 49-52 | αCD3 | Ritu | αPD-L1 | α4-1BB | αCD19 | n/a |
| SI-38P6 | 53-56 | αCD3 | Ritu | αPD-L1 | α4-1BB | αCD19 | n/a |

D5-pentaGNC with NKG2D dimer as a binding domain on LC

| | | | | | | | |
|---|---|---|---|---|---|---|---|
| SI-49P1 | 57-60 | αCD3-alt | αMESO | αPD-L1 | α4-1BB | NKG2D- | n/a |
| | | | | | | dimer | |
| SI-49P2 | 61-64 | αCD3-alt | αClaudin | αPD-L1 | α4-1BB | NKG2D- | n/a |
| | | | | | | dimer | |
| SI-49P3 | 65-68 | αCD3-alt | Tras | αPD-L1 | α4-1BB | NKG2D- | n/a |
| | | | | | | dimer | |
| SI-49P4 | 69-72 | αCD3-alt | αVIII | αPD-L1 | α4-1BB | NKG2D- | n/a |
| | | | | | | dimer | |
| SI-49P5 | 73-76 | αCD3-alt | αCD33 | αPD-L1 | α4-1BB | NKG2D- | n/a |
| | | | | | | dimer | |

HexaGNC

| | | | | | | | |
|---|---|---|---|---|---|---|---|
| SI-1H1 | 175-178 | Pan | αCD3 | αPD-L1 | α4-1BB | SI-BU12 | MM-111 |
| SI-77H4 | 323-326 | αCD3-alt | αEGFR | αPD-L1 | α4-1BB | MM-111 | SI-BU12 |
| | | | H7 | | | | |
| SI-77H5 | 327-330 | αCD3-alt | Cet | αPD-L1 | α4-1BB | MM-111 | SI-BU12 |
| SI-55H11 | 105-108 | αEGFR | αCD3 | αPD-L1 | α4-1BB | MM-111 | SI-BU12 |
| | | H7 | | | | | |
| SI-55H12 | 331-334 | αEGFR | αCD3 | αPD-L1 | α4-1BB | MM-111 | SI-BU12 |
| | | H7 | | | | | |

TABLE 3
Annotation of binding domains for their binding
specificity, domain structure, origin,
and sequence identification number (SEQ ID).

| | Binding | | | |
|---|---|---|---|---|
| Target | Domain | Structure | Origin | SEQ ID |
| Claudin18.2 | αClaudin | scFv | Zolbetuximab | 217-220 |
| HER2 | Tras | scFv | Trastuzumab | 221-224 |
| HER2 | PERT | scFv | Pertuzumab | 225-228 |
| MSLN | αMSLN | scFv | Amatuximab | 229-232 |
| GD2 | αGD2 | scFv | Dinutuximab | 233-236 |
| CD20 | Ritu | scFv | Rituximab | 237-240 |
| EGFR | Cet | scFv | Cetuximab | 241-244 |
| EGFR | αEGFR H7 | scFv | Cetuximab | 319-322 |
| | | | (humanized) | |
| EGFR | Pan | scFv | Panitumumab | 245-248 |
| EGFR | Nimo | scFv | Nimotuzumab | 249-252 |
| CD22 | αCD22 | scFv | Inotuzumab | 253-256 |
| CD30 | αCD30 | scFv | Brentuximab | 257-260 |
| HER3 | MM-111 | scFv | MM-111 | 261-264 |
| mutant | αVIII | scFv | ABT-806 | 265-268 |
| EGFRvIII | | | | |
| CD19 | αCD19 | scFv | 21D4 | 269-272 |
| CD33 | αCD33 | scFv | Gemtuzumab | 273-276 |
| CD3 | αCD3 | scFv | 284A10 | 277-280 |
| CD3 | αCD3-alt | scFv | 284A10 FR 1 | 315-318 |
| PD-L1 | αPD-L1 | scFv | PL221G5 | 281-284 |
| 4-1BB | α4-18BB | scFv | 466F6 | 285-288 |
| CD19 | SI-BU12 | scFv | SI-BU12 | 289-292 |
| NKG2D Ligand | NKG2D | Receptor | NKG2D receptor | 293-294 |
| NKG2D Ligand | NKG2D- | Receptor | NKG2D receptor | 309-310 |
| | dimer | | | |
| 4-1BB | 41BBL | Ligand | 4-1BB ligand | 295-296 |

TABLE 4
The comparative potency of multi-specific GNC molecules with NKG2D
receptor dimer as an additional binding moiety to immune cells
for killing breast cancer cells (MDA-MB-231) in TDCC assay.

| | | | | | | | | |
|---|---|---|---|---|---|---|---|---|
| Sample | | | | | | | EC50 | |
| ID | D1 | D2 | D3 | D4 | D5 | D6 | (pM) | E:T |

| | | | | | | | |
|---|---|---|---|---|---|---|---|
| SI-38E72 | αCD3 | αFITC | αPD-L1 | α4-1BB | | 1.230 | 5 |
| SI-49E1 | NKG2D- | αCD3 | αPD-L1 | α4-1BB | | 0.054 | 5 |
| | dimer | | | | | | |
| SI-49E2 | NKG2D- | αCD3 | α4-1BB | αPD-L1 | | 0.129 | 5 |
| | dimer | | | | | | |
| SI-49E3 | α4-1BB | αPD-L1 | αCD3 | NKG2D- | | 0.055 | 5 |
| | | | | dimer | | | |
| SI-49E4 | αPD-L1 | α4-1BB | αCD3 | NKG2D- | | 0.009 | 5 |
| | | | | dimer | | | |
| SI-49P1 | αCD3 | MSLN | αPD-L1 | α4-1BB | NKG2D- | 0.002 | 5 |
| | | | | | dimer | | |
| SI-49X1 | NKG2D- | αCD3 | | | | 2660 | 5 |
| | dimer | | | | | | |
| SI-49X2 | | | αCD3 | NKG2D- | | 40.7 | 5 |
| | | | | dimer | | | |

TABLE 5
The comparative potency of multi-specific GNC antibodies having the same
binding specificity but different domain structures, e.g. scFv or ligand,
for killing pancreatic cancer cells (BXPC-3) in TDCC assay.

| Sample | | | | D4/scFv | | | EC50 | |
|---|---|---|---|---|---|---|---|---|
| ID | D1/scFv | D2/Fab | D3/scFv | or ligand | D5/scFv | D6/scFv | (pM) | E:T |
| SI-1P1 | αCD3 | Cet | αPD-L1 | α4-1BB | MM-111 | | 0.281 | 5 |
| SI-55P9 | αEGFR | αCD3^{a} | αPD-L1 | α4-1BB | | αCD19^{b} | 0.487 | 5 |
| | H7 | | | | | | | |
| SI-55P10 | αEGFR | αCD3^{a} | αPD-L1 | 41BBL | | αCD19^{b} | 0.736 | 5 |
| | H7 | | | | | | | |
| SI-55H11 | αEGFR | αCD3^{a} | αPD-L1 | α41BB | MM-111 | αCD19^{b} | 0.094 | 5 |
| | H7 | | | | | | | |

^{a}284A10, see Applicant's application No. PCT/US2018/039143;
^{b}SI-huBU12, see Applicant's application No. PCT/US2020/059230.

TABLE 6
The comparative potency of multi-specific GNC antibodies targeting
at least one of these tumor antigens, EGFR, HER2, HER3, or MSLN
for killing breast cancer cells (MDA-MB-231) in TDCC assay.

| | | | | | | | | |
|---|---|---|---|---|---|---|---|---|
| Sample | | | | | | | EC50 | |
| ID | D1 | D2 | D3 | D4 | D5 | D6 | (pM) | E:T |

| | | | | | | | |
|---|---|---|---|---|---|---|---|
| SI-38E72 | αCD3 | αFITC | αPD-L1 | α4-1BB | | 1.230 | 5 |
| SI-55E1 | αCD3 | Cet | αPD-L1 | α4-1BB | | 0.017 | 5 |
| SI-55E2 | αCD3 | Pan | αPD-L1 | α4-1BB | | 0.018 | 5 |
| SI-50E1 | αCD3 | Tras | αPD-L1 | α4-1BB | | 0.063 | 10 |
| SI-50E6 | αCD3 | Tras | αPD-L1 | α4-1BB | | 0.053 | 10 |
| SI-50X1 | αCD3 | Tras | | | | 0.902 | 10 |
| SI-51E1 | αCD3 | αMSLN | αPD-L1 | α4-1BB | | 0.009 | 5 |
| SI-51E4 | αCD3 | αMSLN | αPD-L1 | α4-1BB | | 0.009 | 5 |
| SI-51X1 | αCD3 | αMSLN | | | NKG2D | 0.465 | 5 |
| SI-49P1 | αCD3- | αMSLN | αPD-L1 | α4-1BB | NKG2D | 0.002 | 5 |
| | alt | | | | | | |
| SI-1P1 | αCD3 | Cet | αPD-L1 | α4-1BB | MM-111 | 0.029 | 5 |

TABLE 7
The comparative potency of tetraGNC antibodies targeting one additional
tumor antigen for killing cervical cancer cells (Hela) in TDCC assay.

| | | | | | | | | |
|---|---|---|---|---|---|---|---|---|
| Sample | | | | | | | EC50 | |
| ID | D1 | D2 | D3 | D4 | D5 | D6 | (pM) | E:T |

| | | | | | | |
|---|---|---|---|---|---|---|
| SI-38E72 | αCD3 | αFITC | αPD-L1 | α4-1BB | 48000 | 10 |
| SI-50E1 | αCD3 | Tras | αPD-L1 | α4-1BB | nd | 10 |
| SI-50E2 | αCD3 | PERT | αPD-L1 | α4-1BB | 35 | 10 |
| SI-51E1 | αCD3 | αMSLN | αPD-L1 | α4-1BB | 3140 | 10 |
| SI-52E1 | αCD3 | αGD2 | αPD-L1 | α4-1BB | 1740 | 10 |
| SI-53E1 | αCD3 | αClaudin | αPD-L1 | α4-1BB | nd | 10 |
| SI-54E1 | αCD3 | Ritu | αPD-L1 | α4-1BB | 30 | 10 |
| SI-55E1 | αCD3 | Cet | αPD-L1 | α4-1BB | 13 | 10 |
| SI-55E2 | αCD3 | Pan | αPD-Ll | α4-1BB | 9 | 10 |
| SI-55E3 | αCD3 | Nimo | αPD-L1 | α4-1BB | 33 | 10 |
| SI-56E1 | αCD3 | αCD22 | αPD-L1 | α4-1BB | 186 | 10 |
| SI-57E1 | αCD3 | αCD30 | αPD-L1 | α4-1BB | 96 | 10 |
| SI-38E17 | αCD3 | αCD19 | αPD-L1 | α4-1BB | 46 | 10 |

TABLE 8
qFACS analysis of the expression of tumor antigens and PD-L1
on the surface of normal T lymphocytes and cancer cells.

| \Antibody | Panitumumab | Trastuzumab | MM111 | PL221G5 |
|---|---|---|---|---|
| Cell\ | αEGFR | αHER2 | αHER3 | αPD-L1 |
| T Lymphocyte | 0.00 | 0.00 | 0.00 | 2000.00 |
| MDA-MB-231 | 63858.26 | 15403.43 | 0.00 | 25456.74 |
| BxPC3 | 101584.25 | 1575.51 | 0.00 | 11608.69 |
| HeLa | 24908.49 | 10459.99 | 45441.51 | 0.00 |

TABLE 9
The potency of multi-specific GNC antibodies as determined by
the surface expression of tumor antigen(s) on the cancer cells.

| | | | | | | | | |
|---|---|---|---|---|---|---|---|---|
| Sample | | | | | | | EC50 (pM) | EC50 (pM) |
| ID | D1 | D2 | D3 | D4 | D5 | D6 | Hela | MDA-MB-231 |

| | | | | | | |
|---|---|---|---|---|---|---|
| SI-38E72 | αCD3 | αFITC | αPD-L1 | α4-1BB | 48000 | 1.230 |
| SI-55E1 | αCD3 | Cet | αPD-L1 | α4-1BB | 13 | 0.017 |
| SI-55E2 | αCD3 | Pan | αPD-L1 | α4-1BB | 9 | 0.018 |
| SI-51E1 | αCD3 | αMSLN | αPD-L1 | α4-1BB | 3140 | 0.009 |
| SI-50E1 | αCD3 | Tras | αPD-L1 | α4-1BB | n.d. | 0.063 |

TABLE 10
The generation and characterization of mono-, bi-, tri-, tetra-, and penta-
specific GNC antibodies, including their sequence identification numbers
(SEQ ID), the binding specificity of each domain, from D1 to D6.

| | | | | | | | |
|---|---|---|---|---|---|---|---|
| Sample ID | SEQ ID | D1 | D2 | D3 | D4 | D5 | D6 |

| | | | | | | |
|---|---|---|---|---|---|---|
| SI-49R21 | 195-198 | | NKG2D | | | |
| SI-49R22* | 199-204 | | NKG2D | | | |
| SI-49R23** | 205-206 | | NKG2D | | | |
| SI-49R24*** | 207-210 | | NKG2D | | | |
| SI-49R19 | 183-186 | αCD3-alt | NKG2D | | | |
| SI-49R18 | 187-190 | αCD3-alt | NKG2D | | | SI-BU12 |
| SI-49E15 | 191-194 | αCD3-alt | NKG2D | αPD-L1 | α4-1BB | |
| SI-49P6 | 77-80 | αCD3-alt | NKG2D | αPD-L1 | α4-1BB | SI-BU12 |
| SI-49P7 | 81-84 | αCD3-alt | NKG2D | αPD-L1 | 41BBL | SI-BU12 |

*SI-49R22 contains heterodimerizing Fc with knobs-into-holes mutations (chain A: T366S/L368A/Y407V; and chain B: T366W)
**SI-49R23 lacks the CH1/CL domains
***SI-49R24 contains heterodimerizing Fc with knobs-into-holes mutations (chain A: T366S/L368A/Y407V; and chain B: T366W), and lacks CH1/CL domains

TABLE 11
The comparative binding affinity of selected multispecific
GNCs with NKG2D receptor in the D2 position
for NKG2D ligand, MICA.

| Sample ID | MICA K_{D} (nM) |
|---|---|
| SI-49R21 | 8.95 |
| SI-49R22 | 1.93 |
| SI-49R23 | 14.9 |
| SI-49R24 | 17.7 |
| SI-49R19 | 3.93 |
| SI-49R18 | 5.11 |
| SI-49E15 | 3.34 |
| SI-49P6 | 8.7 |
| SI-49P7 | 11.2 |

TABLE 12
Characterization of representative hexa-GNC antibodies comprising
anti-EGFR and anti-CD3 domains at either D1 (scFv) or D2 (Fab).

| Sample | | | | | | | EGFR KD | Titer | aSEC | EC50 |
|---|---|---|---|---|---|---|---|---|---|---|
| ID | D1 | D2 | D3 | D4 | D5 | D6 | (nM) | (μg/ml) | % POI | (pM) |
| SI- | αCD3- | αEGFR | αPD- | α4- | MM- | SI- | 3.29 | 61.1 | 77.25 | 0.147 |
| 77H4 | alt | H7 | L1 | 1BB | 111 | BU12 | | | | |
| SI- | αCD3- | Cet | αPD- | α4- | MM- | SI- | 3.39 | 35 | 72.02 | 0.192 |
| 77H5 | alt | | L1 | 1BB | 111 | BU12 | | | | |
| SI- | αEGFR | αCD3 | αPD- | α4- | MM- | SI- | 4.65 | 30 | 84.42 | 0.082 |
| 55H11* | H7 | | L1 | 1BB | 111 | BU12 | | | | |
| SI- | αEGFR | αCD3 | αPD- | α4- | MM- | SI- | 7.87 | 76 | 80.00 | nd |
| 55H12 | H7 | | L1 | 1BB | 111 | BU12 | | | | |

*SI-55H11 D2 comprises a disulfide staple between VH and VL (VH-44C, VL-100C)

SEQUENCE LISTING

| | | Heavy | | Light | | | |
|---|---|---|---|---|---|---|---|
| Protein | SEQ. | Chain (HC) | | Chain (LC) | | HC2 | HC2 |
| ID | ID | DNA | aa | DNA | aa | DNA | aa |
| SI-49E1 | 1-4 | 1 | 2 | 3 | 4 | | |
| SI-49E2 | 5-8 | 5 | 6 | 7 | 8 | | |
| SI-49E3 | 9-12 | 9 | 10 | 11 | 12 | | |
| SI-49E4 | 13-16 | 13 | 14 | 15 | 16 | | |
| SI-49E11 | 17-20 | 17 | 18 | 19 | 20 | | |
| SI-49E12 | 21-24 | 21 | 22 | 23 | 24 | | |
| SI-49E13 | 25-28 | 25 | 26 | 27 | 28 | | |
| SI-49E14 | 29-32 | 29 | 30 | 31 | 32 | | |
| SI-1P1 | 33-36 | 33 | 34 | 35 | 36 | | |
| SI-1P2 | 37-40 | 37 | 38 | 39 | 40 | | |
| SI-1P4 | 41-44 | 41 | 42 | 43 | 44 | | |
| SI-39P1 | 45-48 | 45 | 46 | 47 | 48 | | |
| SI-38P5 | 49-52 | 49 | 50 | 51 | 52 | | |
| SI-38P6 | 53-56 | 53 | 54 | 55 | 56 | | |
| SI-49P1 | 57-60 | 57 | 58 | 59 | 60 | | |
| SI-49P2 | 61-64 | 61 | 62 | 63 | 64 | | |
| SI-49P3 | 65-68 | 65 | 66 | 67 | 68 | | |
| SI-49P4 | 69-72 | 69 | 70 | 71 | 72 | | |
| SI-49P5 | 73-76 | 73 | 74 | 75 | 76 | | |
| SI-49P6 | 77-80 | 77 | 78 | 79 | 80 | | |
| SI-49P7 | 81-84 | 81 | 82 | 83 | 84 | | |
| SI-49P10 | 85-88 | 85 | 86 | 87 | 88 | | |
| SI-38E17 | 97-100 | 97 | 98 | 99 | 100 | | |
| SI-55H11 | 105-108 | 105 | 106 | 107 | 108 | | |
| SI-50E1 | 109-112 | 109 | 110 | 111 | 112 | | |
| SI-50E2 | 115-118 | 115 | 116 | 117 | 118 | | |
| SI-51E1 | 121-124 | 121 | 122 | 123 | 124 | | |
| SI-52E1 | 127-130 | 127 | 128 | 129 | 130 | | |
| SI-53E1 | 133-136 | 133 | 134 | 135 | 136 | | |
| SI-54E1 | 139-142 | 139 | 140 | 141 | 142 | | |
| SI-55E1 | 145-148 | 145 | 146 | 147 | 148 | | |
| SI-55E2 | 151-154 | 151 | 152 | 153 | 154 | | |
| SI-55E3 | 157-160 | 157 | 158 | 159 | 160 | | |
| SI-56E1 | 163-166 | 163 | 164 | 165 | 166 | | |
| SI-57E1 | 169-172 | 169 | 170 | 171 | 172 | | |
| SI-50E6 | 111-114 | 113 | 114 | 111 | 112 | | |
| SI-50E7 | 117-120 | 119 | 120 | 117 | 118 | | |
| SI-51E4 | 123-126 | 125 | 126 | 123 | 124 | | |
| SI-52E4 | 129-132 | 131 | 132 | 129 | 130 | | |
| SI-53E3 | 135-138 | 137 | 138 | 135 | 136 | | |
| SI-54E3 | 141-144 | 143 | 144 | 141 | 142 | | |
| SI-55E8 | 147-150 | 149 | 150 | 147 | 148 | | |
| SI-55E9 | 153-156 | 155 | 156 | 153 | 154 | | |
| SI-55E10 | 159-162 | 161 | 162 | 159 | 160 | | |
| SI-56E3 | 165-168 | 167 | 168 | 165 | 166 | | |
| SI-57E3 | 171-174 | 173 | 174 | 171 | 172 | | |
| SI-1H1 | 175-178 | 175 | 176 | 177 | 178 | | |
| SI-49R19 | 183-186 | 183 | 184 | 185 | 186 | | |
| SI-49R18 | 187-190 | 187 | 188 | 189 | 190 | | |
| SI-49E15 | 191-194 | 191 | 192 | 193 | 194 | | |
| SI-49R21 | 195-198 | 195 | 196 | 197 | 198 | | |
| SI-49R22 | 199-204 | 199 | 200 | 201 | 202 | 203 | 204 |
| SI-49R23 | 205-206 | 205 | 206 | | | | |
| SI-49R24 | 207-210 | 207 | 208 | 209 | 210 | | |
| SI-55P9 | 301-304 | 301 | 302 | 303 | 304 | | |
| SI-55P10 | 305-308 | 305 | 306 | 307 | 308 | | |
| SI-77H4 | 323-326 | 323 | 324 | 325 | 326 | | |
| SI-77H5 | 327-330 | 327 | 328 | 329 | 330 | | |
| SI-55H12 | 331-334 | 331 | 332 | 333 | 334 | | |

| Binding | | VH/1/A | VH/1/A | VL/2/B | VL/2/B |
|---|---|---|---|---|---|
| Domain | SEQ ID | DNA | AA | DNA | AA |
| αClaudin | 217-220 | 217 | 218 | 219 | 220 |
| Tras | 221-224 | 221 | 222 | 223 | 224 |
| PERT | 225-228 | 225 | 226 | 227 | 228 |
| αMSLN | 229-232 | 229 | 230 | 231 | 232 |
| αGD2 | 233-236 | 233 | 234 | 235 | 236 |
| Ritu | 237-240 | 237 | 238 | 239 | 240 |
| Get | 241-244 | 241 | 242 | 243 | 244 |
| αEGFR H7 | 319-322 | 319 | 320 | 321 | 322 |
| Pan | 245-248 | 245 | 246 | 247 | 248 |
| Nimo | 249-252 | 249 | 250 | 251 | 252 |
| αCD22 | 253-256 | 253 | 254 | 255 | 256 |
| αCD30 | 257-260 | 257 | 258 | 259 | 260 |
| MM-111 | 261-264 | 261 | 262 | 263 | 264 |
| αVIII | 265-268 | 265 | 266 | 267 | 268 |
| αCD19 | 269-272 | 269 | 270 | 271 | 272 |
| αCD33 | 273-276 | 273 | 274 | 275 | 276 |
| αCD3 | 277-280 | 277 | 278 | 279 | 280 |
| αCD3-alt | 315-318 | 315 | 316 | 317 | 318 |
| αPD-L1 | 281-284 | 281 | 282 | 283 | 284 |
| α4-1BB | 285-288 | 285 | 286 | 287 | 288 |
| SI-BU12 | 289-292 | 289 | 290 | 291 | 292 |
| αFITC | 311-314 | 311 | 312 | 313 | 314 |
| NKG2D | 293-294 | 293 | 294 | | |
| NKG2D- | 309-310 | 309 | 310 | | |
| dimer | | | | | |
| 41BBL | 295-296 | 295 | 296 | | |
| αEGFR | 297-298 | 297 | 298 | | |
| αHER3 | 299-300 | 299 | 300 | | |

CDR's underlined in amino acid sequences
Chain A: HC or Chain 1
Chain B: LC or Chain 2

>SEQ ID 1 SI-49E1 chain A nt
TTTCTTAATTCCCTTTTCAACCAAGAGGTTCAGATCCCCTTGACTGAAAGCTATTGCGGCCCTTGTCCGAAAAACTG
GATATGTTACAAGAATAATTGTTACCAATTCTTCGACGAAAGCAAGAACTGGTATGAGAGTCAGGCGTCTTGTATGA
GTCAGAATGCCAGCCTGCTTAAGGTTTATTCAAAAGAAGACCAGGATCTGCTTAAGTTGGTAAAGAGCTACCACTGG
ATGGGGCTGGTACATATCCCAACGAATGGGTCATGGCAGTGGGAGGACGGTTCTATTCTGAGTCCAAATCTCCTGAC
GATCATCGAAATGCAGAAAGGGGACTGTGCCCTGTATGCATCATCCTTCAAGGGGTACATCGAGAACTGCAGTACCC
CAAATACCTACATTTGTATGCAAAGAACGGTTGGAGGCGGTGGCTCAGGCGGAGGCGGCTCAGGAGGTGGCGGTTCA
GGAGGCGGCGGATCTTTCCTAAACTCATTATTCAACCAAGAAGTTCAAATTCCCTTGACCGAAAGTTACTGTGGCCC
ATGTCCTAAAAACTGGATATGTTACAAAAATAACTGCTACCAATTTTTTGATGAGAGTAAAAACTGGTATGAGAGCC
AGGCTTCTTGTATGTCTCAAAATGCCAGCCTTCTGAAAGTATACAGCAAAGAGGACCAGGATTTACTTAAACTGGTG
AAGTCATATCATTGGATGGGACTAGTACACATTCCAACAAATGGATCTTGGCAGTGGGAAGATGGCTCCATTCTCTC
ACCCAACCTACTAACAATAATTGAAATGCAGAAGGGAGACTGTGCACTCTATGCCTCGAGCTTTAAAGGCTATATAG
AAAACTGTTCAACTCCAAATACGTACATCTGCATGCAAAGGACTGTGGTCGACGGCGGTGGAGGGTCCGGCGGTGGT
GGATCAGAGGTGCAGCTGGTGGAGTCTGGGGGAGGCTTGGTCCAGCCTGGGGGGTCCCTGAGACTCTCCTGTGCAGC
CTCTGGATTCACCATCAGTACCAATGCAATGAGCTGGGTCCGCCAGGCTCCAGGGAAGGGGCTGGAGTGGATCGGAG
TCATTACTGGTCGTGATATCACATACTACGCGAGCTGGGCGAAAGGCAGATTCACCATCTCCAGAGACAATTCCAAG
AACACGCTGTATCTTCAAATGAACAGCCTGAGAGCCGAGGACACGGCTGTGTATTACTGTGCGAGAGACGGTGGTTC
TTCTGCTATTACTAGTAACAACATTTGGGGCCAGGGAACCCTGGTCACCGTGTCCTCAGCTAGCACCAAGGGCCCAT
CGGTCTTCCCCCTGGCACCCTCCTCCAAGAGCACCTCTGGGGGCACAGCGGCCCTGGGCTGCCTGGTCAAGGACTAC
TTCCCCGAACCGGTGACGGTGTCGTGGAACTCAGGCGCCCTGACCAGCGGCGTGCACACCTTCCCGGCTGTCCTACA
GTCCTCAGGACTCTACTCCCTCAGCAGCGTGGTGACCGTGCCCTCCAGCAGCTTGGGCACCCAGACCTACATCTGCA
ACGTGAATCACAAGCCCAGCAACACCAAGGTGGACAAGAGAGTTGAGCCCAAATCTTGTGACAAAACTCACACATGC
CCACCGTGCCCAGCACCTGAAGCCGCGGGGGCACCGTCAGTCTTCCTCTTCCCCCCAAAACCCAAGGACACCCTCAT
GATCTCCCGGACCCCTGAGGTCACATGCGTGGTGGTGGACGTGAGCCACGAAGACCCTGAGGTCAAGTTCAACTGGT
ACGTGGACGGCGTGGAGGTGCATAATGCCAAGACAAAGCCGCGGGAGGAGCAGTACAACAGCACGTACCGTGTGGTC
AGCGTCCTCACCGTCCTGCACCAGGACTGGCTGAATGGCAAGGAGTACAAGTGCGCGGTCTCCAACAAAGCCCTCCC
AGCCCCCATCGAGAAAACCATCTCCAAAGCCAAAGGGCAGCCCCGAGAACCACAGGTGTACACCCTGCCCCCATCCC
GGGATGAGCTGACCAAGAACCAGGTCAGCCTGACCTGCCTGGTCAAAGGCTTCTATCCCAGCGACATCGCCGTGGAG
TGGGAGAGCAATGGGCAGCCGGAGAACAACTACAAGACCACGCCTCCCGTGCTGGACTCCGACGGCTCCTTCTTCCT
CTATAGCAAGCTCACCGTGGACAAGAGCAGGTGGCAGCAGGGGAACGTCTTCTCATGCTCCGTGATGCATGAGGCTC
TGCACAACCACTACACGCAGAAGAGCCTCTCCCTGTCTCCGGGTGGCGGTGGAGGGTCCGGCGGTGGTGGATCCGAG
GTGCAGCTGTTGGAGTCTGGGGGAGGCTTGGTACAGCCTGGGGGGTCCCTGAGACTCTCCTGTGCAGCCTCTGGATT
CTCCTTCAGTAGCGGGTACGACATGTGCTGGGTCCGCCAGGCTCCAGGGAAGGGGCTGGAGTGGATCGCATGCATTG
CTGCTGGTAGTGCTGGTATCACTTACGACGCGAACTGGGCGAAAGGCCGGTTCACCATCTCCAGAGACAATTCCAAG
AACACGCTGTATCTGCAAATGAACAGCCTGAGAGCCGAGGACACGGCCGTATATTACTGTGCGAGATCGGCGTTTTC
GTTCGACTACGCCATGGACCTCTGGGGCCAGGGAACCCTGGTCACCGTCTCGAGCGGTGGAGGCGGATCTGGCGGAG
GTGGTTCCGGCGGTGGCGGCTCCGGTGGAGGCGGCTCTGACATCCAGATGACCCAGTCTCCTTCCACCCTGTCTGCA
TCTGTAGGAGACAGAGTCACCATCACTTGCCAGGCCAGTCAGAGCATTAGTTCCCACTTAAACTGGTATCAGCAGAA
ACCAGGGAAAGCCCCTAAGCTCCTGATCTATAAGGCATCCACTCTGGCATCTGGGGTCCCATCAAGGTTCAGCGGCA
GTGGATCTGGGACAGAATTTACTCTCACCATCAGCAGCCTGCAGCCTGATGATTTTGCAACTTATTACTGCCAACAG
GGTTATAGTTGGGGTAATGTTGATAATGTTTTCGGCGGAGGGACCAAGGTGGAGATCAAAGGCGGTGGAGGGTCCGG
CGGTGGTGGCTCCGGACGGTCGCTGGTGGAGTCTGGGGGAGGCTTGGTCCAGCCTGGGGGGTCCCTGAGACTCTCCT
GTACTGCCTCTGGATTCACCATCAGTAGCTACCACATGCAGTGGGTCCGCCAGGCTCCAGGGAAGGGGCTGGAGTAC
ATCGGAACCATTAGTAGTGGTGGTAATGTATACTACGCAAGCTCCGCTAGAGGCAGATTCACCATCTCCAGACCCTC
GTCCAAGAACACGGTGGATCTTCAAATGAACAGCCTGAGAGCCGAGGACACGGCTGTGTATTACTGTGCGAGAGACT
CTGGTTATAGTGATCCTATGTGGGGCCAGGGAACCCTGGTCACCGTCTCTTCAGGCGGTGGCGGTAGTGGGGGAGGC
GGTTCTGGCGGCGGAGGGTCCGGCGGTGGAGGATCAGACGTTGTGATGACCCAGTCTCCATCTTCCGTGTCTGCATC
TGTAGGAGACAGAGTCACCATCACCTGTCAGGCCAGTCAGAACATTAGGACTTACTTATCCTGGTATCAGCAGAAAC
CAGGGAAAGCCCCTAAGCTCCTGATCTATGCTGCAGCCAATCTGGCATCTGGGGTCCCATCAAGGTTCAGCGGCAGT
GGATCTGGGACAGATTTCACTCTCACCATCAGCGACCTGGAGCCTGGCGATGCTGCAACTTACTATTGTCAGTCTAC
CTATCTTGGTACTGATTATGTTGGCGGTGCTTTCGGCGGAGGGACCAAGGTGGAGATCAAA
>SEQ ID 2 SI-49E1 chain A aa
FLNSLFNQEVQIPLTESYCGPCPKNWICYKNNCYQFFDESKNWYESQASCMSQNASLLKVYSKEDQDLLKLVKSYHW
MGLVHIPTNGSWQWEDGSILSPNLLTIIEMQKGDCALYASSFKGYIENCSTPNTYICMQRTVGGGGSGGGGSGGGGS
GGGGSFLNSLFNQEVQIPLTESYCGPCPKNWICYKNNCYQFFDESKNWYESQASCMSQNASLLKVYSKEDQDLLKLV
KSYHWMGLVHIPTNGSWQWEDGSILSPNLLTIIEMQKGDCALYASSFKGYIENCSTPNTYICMQRTVVDGGGGSGGG
GSEVQLVESGGGLVQPGGSLRLSCAASGFTISTNAMSWVRQAPGKGLEWIGVITGRDITYYASWAKGRFTISRDNSK
NTLYLQMNSLRAEDTAVYYCARDGGSSAITSNNIWGQGTLVTVSSASTKGPSVFPLAPSSKSTSGGTAALGCLVKDY
FPEPVTVSWNSGALTSGVHTFPAVLQSSGLYSLSSVVTVPSSSLGTQTYICNVNHKPSNTKVDKRVEPKSCDKTHTC
PPCPAPEAAGAPSVFLFPPKPKDTLMISRTPEVTCVVVDVSHEDPEVKFNWYVDGVEVHNAKTKPREEQYNSTYRVV
SVLTVLHQDWLNGKEYKCAVSNKALPAPIEKTISKAKGQPREPQVYTLPPSRDELTKNQVSLTCLVKGFYPSDIAVE
WESNGQPENNYKTTPPVLDSDGSFFLYSKLTVDKSRWQQGNVFSCSVMHEALHNHYTQKSLSLSPGGGGGSGGGGSE
VQLLESGGGLVQPGGSLRLSCAASGFSFSSGYDMCWVRQAPGKGLEWIACIAAGSAGITYDANWAKGRFTISRDNSK
NTLYLQMNSLRAEDTAVYYCARSAFSFDYAMDLWGQGTLVTVSSGGGGSGGGGSGGGGSGGGGSDIQMTQSPSTLSA
SVGDRVTITCQASQSISSHLNWYQQKPGKAPKLLIYKASTLASGVPSRFSGSGSGTEFTLTISSLQPDDFATYYCQQ
GYSWGNVDNVFGGGTKVEIKGGGGSGGGGSGRSLVESGGGLVQPGGSLRLSCTASGFTISSYHMQWVRQAPGKGLEY
IGTISSGGNVYYASSARGRFTISRPSSKNTVDLQMNSLRAEDTAVYYCARDSGYSDPMWGQGTLVTVSSGGGGSGGG
GSGGGGSGGGGSDVVMTQSPSSVSASVGDRVTITCQASQNIRTYLSWYQQKPGKAPKLLIYAAANLASGVPSRFSGS
GSGTDFTLTISDLEPGDAATYYCQSTYLGTDYVGGAFGGGTKVEIK
>SEQ ID 3 SI-49E1 chain B nt
GACGTCGTGATGACCCAGTCTCCTTCCACCCTGTCTGCATCTGTAGGAGACAGAGTCACCATCAATTGCCAAGCCAG
TGAGAGCATTAGCAGTTGGTTAGCCTGGTATCAGCAGAAACCAGGGAAAGCCCCTAAGCTCCTGATCTATGAAGCAT
CCAAACTGGCATCTGGGGTCCCATCAAGGTTCAGCGGCAGTGGATCTGGGACAGAATTCACTCTCACCATCAGCAGC
CTGCAGCCTGATGATTTTGCAACTTATTACTGCCAAGGCTATTTTTATTTTATTAGTCGTACTTATGTAAATTCTTT
CGGCGGAGGGACCAAGGTGGAGATCAAACGTACGGTGGCTGCACCATCTGTCTTCATCTTCCCGCCATCTGATGAGC
AGTTGAAATCTGGAACTGCCTCTGTTGTGTGCCTGCTGAATAACTTCTATCCCAGAGAGGCCAAAGTACAGTGGAAG
GTGGATAACGCCCTCCAATCGGGTAACTCCCAGGAGAGTGTCACAGAGCAGGACAGCAAGGACAGCACCTACAGCCT
CAGCAGCACCCTGACGCTGAGCAAAGCAGACTACGAGAAACACAAAGTCTACGCCTGCGAAGTCACCCATCAGGGCC
TGAGCTCGCCCGTCACAAAGAGCTTCAACAGGGGAGAGTGT
>SEQ ID 4 SI-49E1 chain B aa
DVVMTQSPSTLSASVGDRVTINCQASESISSWLAWYQQKPGKAPKLLIYEASKLASGVPSRFSGSGSGTEFTLTISS
LQPDDFATYYCQGYFYFISRTYVNSFGGGTKVEIKRTVAAPSVFIFPPSDEQLKSGTASVVCLLNNFYPREAKVQWK
VDNALQSGNSQESVTEQDSKDSTYSLSSTLTLSKADYEKHKVYACEVTHQGLSSPVTKSFNRGEC
>SEQ ID 5 SI-49E2 chain A nt
TTTCTTAATTCCCTTTTCAACCAAGAGGTTCAGATCCCCTTGACTGAAAGCTATTGCGGCCCTTGTCCGAAAAACTG
GATATGTTACAAGAATAATTGTTACCAATTCTTCGACGAAAGCAAGAACTGGTATGAGAGTCAGGCGTCTTGTATGA
GTCAGAATGCCAGCCTGCTTAAGGTTTATTCAAAAGAAGACCAGGATCTGCTTAAGTTGGTAAAGAGCTACCACTGG
ATGGGGCTGGTACATATCCCAACGAATGGGTCATGGCAGTGGGAGGACGGTTCTATTCTGAGTCCAAATCTCCTGAC
GATCATCGAAATGCAGAAAGGGGACTGTGCCCTGTATGCATCATCCTTCAAGGGGTACATCGAGAACTGCAGTACCC
CAAATACCTACATTTGTATGCAAAGAACGGTTGGAGGCGGTGGCTCAGGCGGAGGCGGCTCAGGAGGTGGCGGTTCA
GGAGGCGGCGGATCTTTCCTAAACTCATTATTCAACCAAGAAGTTCAAATTCCCTTGACCGAAAGTTACTGTGGCCC
ATGTCCTAAAAACTGGATATGTTACAAAAATAACTGCTACCAATTTTTTGATGAGAGTAAAAACTGGTATGAGAGCC
AGGCTTCTTGTATGTCTCAAAATGCCAGCCTTCTGAAAGTATACAGCAAAGAGGACCAGGATTTACTTAAACTGGTG
AAGTCATATCATTGGATGGGACTAGTACACATTCCAACAAATGGATCTTGGCAGTGGGAAGATGGCTCCATTCTCTC
ACCCAACCTACTAACAATAATTGAAATGCAGAAGGGAGACTGTGCACTCTATGCCTCGAGCTTTAAAGGCTATATAG
AAAACTGTTCAACTCCAAATACGTACATCTGCATGCAAAGGACTGTGGTCGACGGCGGTGGAGGGTCCGGCGGTGGT
GGATCAGAGGTGCAGCTGGTGGAGTCTGGGGGAGGCTTGGTCCAGCCTGGGGGGTCCCTGAGACTCTCCTGTGCAGC
CTCTGGATTCACCATCAGTACCAATGCAATGAGCTGGGTCCGCCAGGCTCCAGGGAAGGGGCTGGAGTGGATCGGAG
TCATTACTGGTCGTGATATCACATACTACGCGAGCTGGGCGAAAGGCAGATTCACCATCTCCAGAGACAATTCCAAG
AACACGCTGTATCTTCAAATGAACAGCCTGAGAGCCGAGGACACGGCTGTGTATTACTGTGCGAGAGACGGTGGTTC
TTCTGCTATTACTAGTAACAACATTTGGGGCCAGGGAACCCTGGTCACCGTGTCCTCAGCTAGCACCAAGGGCCCAT
CGGTCTTCCCCCTGGCACCCTCCTCCAAGAGCACCTCTGGGGGCACAGCGGCCCTGGGCTGCCTGGTCAAGGACTAC
TTCCCCGAACCGGTGACGGTGTCGTGGAACTCAGGCGCCCTGACCAGCGGCGTGCACACCTTCCCGGCTGTCCTACA
GTCCTCAGGACTCTACTCCCTCAGCAGCGTGGTGACCGTGCCCTCCAGCAGCTTGGGCACCCAGACCTACATCTGCA
ACGTGAATCACAAGCCCAGCAACACCAAGGTGGACAAGAGAGTTGAGCCCAAATCTTGTGACAAAACTCACACATGC
CCACCGTGCCCAGCACCTGAAGCCGCGGGGGCACCGTCAGTCTTCCTCTTCCCCCCAAAACCCAAGGACACCCTCAT
GATCTCCCGGACCCCTGAGGTCACATGCGTGGTGGTGGACGTGAGCCACGAAGACCCTGAGGTCAAGTTCAACTGGT
ACGTGGACGGCGTGGAGGTGCATAATGCCAAGACAAAGCCGCGGGAGGAGCAGTACAACAGCACGTACCGTGTGGTC
AGCGTCCTCACCGTCCTGCACCAGGACTGGCTGAATGGCAAGGAGTACAAGTGCGCGGTCTCCAACAAAGCCCTCCC
AGCCCCCATCGAGAAAACCATCTCCAAAGCCAAAGGGCAGCCCCGAGAACCACAGGTGTACACCCTGCCCCCATCCC
GGGATGAGCTGACCAAGAACCAGGTCAGCCTGACCTGCCTGGTCAAAGGCTTCTATCCCAGCGACATCGCCGTGGAG
TGGGAGAGCAATGGGCAGCCGGAGAACAACTACAAGACCACGCCTCCCGTGCTGGACTCCGACGGCTCCTTCTTCCT
CTATAGCAAGCTCACCGTGGACAAGAGCAGGTGGCAGCAGGGGAACGTCTTCTCATGCTCCGTGATGCATGAGGCTC
TGCACAACCACTACACGCAGAAGAGCCTCTCCCTGTCTCCGGGTGGCGGTGGAGGGTCCGGCGGTGGTGGATCCCGG
TCGCTGGTGGAGTCTGGGGGAGGCTTGGTCCAGCCTGGGGGGTCCCTGAGACTCTCCTGTACTGCCTCTGGATTCAC
CATCAGTAGCTACCACATGCAGTGGGTCCGCCAGGCTCCAGGGAAGGGGCTGGAGTACATCGGAACCATTAGTAGTG
GTGGTAATGTATACTACGCGAGCTCCGCGAGAGGCAGATTCACCATCTCCAGACCCTCGTCCAAGAACACGGTGGAT
CTTCAAATGAACAGCCTGAGAGCCGAGGACACGGCTGTGTATTACTGTGCGAGAGACTCTGGTTATAGTGATCCTAT
GTGGGGCCAGGGAACCCTGGTCACCGTCTCTTCAGGCGGTGGCGGTAGTGGGGGAGGCGGTTCTGGCGGCGGAGGGT
CCGGCGGTGGAGGATCAGACGTTGTGATGACCCAGTCTCCATCTTCCGTGTCTGCATCTGTAGGAGACAGAGTCACC
ATCACCTGTCAGGCCAGTCAGAACATTAGGACTTACTTATCCTGGTATCAGCAGAAACCAGGGAAAGCCCCTAAGCT
CCTGATCTATGCTGCAGCCAATCTGGCATCTGGGGTCCCATCAAGGTTCAGCGGCAGTGGATCTGGGACAGATTTCA
CTCTCACCATCAGCGACCTGGAGCCTGGCGATGCTGCAACTTACTATTGTCAGTCTACCTATCTTGGTACTGATTAT
GTTGGCGGTGCTTTCGGCGGAGGGACCAAGGTGGAGATCAAAGGCGGTGGAGGGTCCGGCGGTGGTGGCTCCGGAGA
GGTGCAGCTGTTGGAGTCTGGGGGAGGCTTGGTACAGCCTGGGGGGTCCCTGAGACTCTCCTGTGCAGCCTCTGGAT
TCTCCTTCAGTAGCGGGTACGACATGTGCTGGGTCCGCCAGGCTCCAGGGAAGGGGCTGGAGTGGATCGCATGCATT
GCTGCTGGTAGTGCTGGTATCACTTACGACGCGAACTGGGCGAAAGGCCGGTTCACCATCTCCAGAGACAATTCCAA
GAACACGCTGTATCTGCAAATGAACAGCCTGAGAGCCGAGGACACGGCCGTATATTACTGTGCGAGATCGGCGTTTT
CGTTCGACTACGCCATGGACCTCTGGGGCCAGGGAACCCTGGTCACCGTCTCGAGCGGCGGTGGCGGTAGTGGGGGA
GGCGGTTCTGGCGGCGGAGGGTCCGGCGGTGGAGGATCAGACATCCAGATGACCCAGTCTCCTTCCACCCTGTCTGC
ATCTGTAGGAGACAGAGTCACCATCACTTGCCAGGCCAGTCAGAGCATTAGTTCCCACTTAAACTGGTATCAGCAGA
AACCAGGGAAAGCCCCTAAGCTCCTGATCTATAAGGCATCCACTCTGGCATCTGGGGTCCCATCAAGGTTCAGCGGC
AGTGGATCTGGGACAGAATTTACTCTCACCATCAGCAGCCTGCAGCCTGATGATTTTGCAACTTATTACTGCCAACA
GGGTTATAGTTGGGGTAATGTTGATAATGTTTTCGGCGGAGGGACCAAGGTGGAGATCAAA
>SEQ ID 6 SI-49E2 chain A aa
FLNSLFNQEVQIPLTESYCGPCPKNWICYKNNCYQFFDESKNWYESQASCMSQNASLLKVYSKEDQDLLKLVKSYHW
MGLVHIPTNGSWQWEDGSILSPNLLTIIEMQKGDCALYASSFKGYIENCSTPNTYICMQRTVGGGGSGGGGSGGGGS
GGGGSFLNSLFNQEVQIPLTESYCGPCPKNWICYKNNCYQFFDESKNWYESQASCMSQNASLLKVYSKEDQDLLKLV
KSYHWMGLVHIPTNGSWQWEDGSILSPNLLTIIEMQKGDCALYASSFKGYIENCSTPNTYICMQRTVVDGGGGSGGG
GSEVQLVESGGGLVQPGGSLRLSCAASGFTISTNAMSWVRQAPGKGLEWIGVITGRDITYYASWAKGRFTISRDNSK
NTLYLQMNSLRAEDTAVYYCARDGGSSAITSNNIWGQGTLVTVSSASTKGPSVFPLAPSSKSTSGGTAALGCLVKDY
FPEPVTVSWNSGALTSGVHTFPAVLQSSGLYSLSSVVTVPSSSLGTQTYICNVNHKPSNTKVDKRVEPKSCDKTHTC
PPCPAPEAAGAPSVFLFPPKPKDTLMISRTPEVTCVVVDVSHEDPEVKFNWYVDGVEVHNAKTKPREEQYNSTYRVV
SVLTVLHQDWLNGKEYKCAVSNKALPAPIEKTISKAKGQPREPQVYTLPPSRDELTKNQVSLTCLVKGFYPSDIAVE
WESNGQPENNYKTTPPVLDSDGSFFLYSKLTVDKSRWQQGNVFSCSVMHEALHNHYTQKSLSLSPGGGGGSGGGGSR
SLVESGGGLVQPGGSLRLSCTASGFTISSYHMQWVRQAPGKGLEYIGTISSGGNVYYASSARGRFTISRPSSKNTVD
LQMNSLRAEDTAVYYCARDSGYSDPMWGQGTLVTVSSGGGGSGGGGSGGGGSGGGGSDVVMTQSPSSVSASVGDRVT
ITCQASQNIRTYLSWYQQKPGKAPKLLIYAAANLASGVPSRFSGSGSGTDFTLTISDLEPGDAATYYCQSTYLGTDY
VGGAFGGGTKVEIKGGGGSGGGGSGEVQLLESGGGLVQPGGSLRLSCAASGFSFSSGYDMCWVRQAPGKGLEWIACI
AAGSAGITYDANWAKGRFTISRDNSKNTLYLQMNSLRAEDTAVYYCARSAFSFDYAMDLWGQGTLVTVSSGGGGSGG
GGSGGGGSGGGGSDIQMTQSPSTLSASVGDRVTITCQASQSISSHLNWYQQKPGKAPKLLIYKASTLASGVPSRFSG
SGSGTEFTLTISSLQPDDFATYYCQQGYSWGNVDNVFGGGTKVEIK
>SEQ ID 7 SI-49E2 chain B nt
GACGTCGTGATGACCCAGTCTCCTTCCACCCTGTCTGCATCTGTAGGAGACAGAGTCACCATCAATTGCCAAGCCAG
TGAGAGCATTAGCAGTTGGTTAGCCTGGTATCAGCAGAAACCAGGGAAAGCCCCTAAGCTCCTGATCTATGAAGCAT
CCAAACTGGCATCTGGGGTCCCATCAAGGTTCAGCGGCAGTGGATCTGGGACAGAATTCACTCTCACCATCAGCAGC
CTGCAGCCTGATGATTTTGCAACTTATTACTGCCAAGGCTATTTTTATTTTATTAGTCGTACTTATGTAAATTCTTT
CGGCGGAGGGACCAAGGTGGAGATCAAACGTACGGTGGCTGCACCATCTGTCTTCATCTTCCCGCCATCTGATGAGC
AGTTGAAATCTGGAACTGCCTCTGTTGTGTGCCTGCTGAATAACTTCTATCCCAGAGAGGCCAAAGTACAGTGGAAG
GTGGATAACGCCCTCCAATCGGGTAACTCCCAGGAGAGTGTCACAGAGCAGGACAGCAAGGACAGCACCTACAGCCT
CAGCAGCACCCTGACGCTGAGCAAAGCAGACTACGAGAAACACAAAGTCTACGCCTGCGAAGTCACCCATCAGGGCC
TGAGCTCGCCCGTCACAAAGAGCTTCAACAGGGGAGAGTGT
>SEQ ID 8 SI-49E2 chain B aa
DVVMTQSPSTLSASVGDRVTINCQASESISSWLAWYQQKPGKAPKLLIYEASKLASGVPSRFSGSGSGTEFTLTISS
LQPDDFATYYCQGYFYFISRTYVNSFGGGTKVEIKRTVAAPSVFIFPPSDEQLKSGTASVVCLLNNFYPREAKVQWK
VDNALQSGNSQESVTEQDSKDSTYSLSSTLTLSKADYEKHKVYACEVTHQGLSSPVTKSFNRGEC
>SEQ ID 9 SI-49E3 chain A nt
GACGTTGTGATGACCCAGTCTCCATCTTCCGTGTCTGCATCTGTAGGAGACAGAGTCACCATCACCTGTCAGGCCAG
TCAGAACATTAGGACTTACTTATCCTGGTATCAGCAGAAACCAGGGAAAGCCCCTAAGCTCCTGATCTATGCTGCAG
CCAATCTGGCATCTGGGGTCCCATCAAGGTTCAGCGGCAGTGGATCTGGGACAGATTTCACTCTCACCATCAGCGAC
CTGGAGCCTGGCGATGCTGCAACTTACTATTGTCAGTCTACCTATCTTGGTACTGATTATGTTGGCGGTGCTTTCGG
CGGAGGGACCAAGGTGGAGATCAAAGGCGGTGGCGGTAGTGGGGGAGGCGGTTCTGGCGGCGGAGGGTCCGGCGGTG
GAGGATCACGGTCGCTGGTGGAGTCTGGGGGAGGCTTGGTCCAGCCTGGGGGGTCCCTGAGACTCTCCTGTACAGCC
TCTGGATTCACCATCAGTAGCTACCACATGCAGTGGGTCCGCCAGGCTCCAGGGAAGGGGCTGGAGTACATCGGAAC
CATTAGTAGTGGTGGTAATGTATACTACGCAAGCTCCGCTAGAGGCAGATTCACCATCTCCAGACCCTCGTCCAAGA
ACACGGTGGATCTTCAAATGAACAGCCTGAGAGCCGAGGACACGGCTGTGTATTACTGTGCGAGAGACTCTGGTTAT
AGTGATCCTATGTGGGGCCAGGGAACCCTGGTCACCGTGTCGACAGGCGGTGGAGGGTCCGGCGGTGGTGGATCAGA
GGTGCAGCTGTTGGAGTCTGGGGGAGGCTTGGTACAGCCTGGGGGGTCCCTGAGACTCTCCTGTGCAGCCTCTGGAT
TCTCCTTCAGTAGCGGGTACGACATGTGCTGGGTCCGCCAGGCTCCAGGGAAGGGGCTGGAGTGGATCGCATGTATT
GCTGCTGGTAGTGCTGGTATCACTTACGACGCGAACTGGGCGAAAGGCCGGTTCACCATCTCCAGAGACAATTCCAA
GAACACGCTGTATCTGCAAATGAACAGCCTGAGAGCCGAGGACACGGCCGTATATTACTGTGCGAGATCGGCGTTTT
CGTTCGACTACGCCATGGACCTCTGGGGCCAGGGAACCCTGGTCACCGTCTCGAGCGCTAGCACCAAGGGCCCATCG
GTCTTCCCCCTGGCACCCTCCTCCAAGAGCACCTCTGGGGGCACAGCGGCCCTGGGCTGCCTGGTCAAGGACTACTT
CCCCGAACCGGTGACGGTGTCGTGGAACTCAGGCGCCCTGACCAGCGGCGTGCACACCTTCCCGGCTGTCCTACAGT
CCTCAGGACTCTACTCCCTCAGCAGCGTGGTGACCGTGCCCTCCAGCAGCTTGGGCACCCAGACCTACATCTGCAAC
GTGAATCACAAGCCCAGCAACACCAAGGTGGACAAGAGAGTTGAGCCCAAATCTTGTGACAAAACTCACACATGCCC
ACCGTGCCCAGCACCTGAAGCCGCGGGGGCACCGTCAGTCTTCCTCTTCCCCCCAAAACCCAAGGACACCCTCATGA
TCTCCCGGACCCCTGAGGTCACATGCGTGGTGGTGGACGTGAGCCACGAAGACCCTGAGGTCAAGTTCAACTGGTAC
GTGGACGGCGTGGAGGTGCATAATGCCAAGACAAAGCCGCGGGAGGAGCAGTACAACAGCACGTACCGTGTGGTCAG
CGTCCTCACCGTCCTGCACCAGGACTGGCTGAATGGCAAGGAGTACAAGTGCGCGGTCTCCAACAAAGCCCTCCCAG
CCCCCATCGAGAAAACCATCTCCAAAGCCAAAGGGCAGCCCCGAGAACCACAGGTGTACACCCTGCCCCCATCCCGG
GATGAGCTGACCAAGAACCAGGTCAGCCTGACCTGCCTGGTCAAAGGCTTCTATCCCAGCGACATCGCCGTGGAGTG
GGAGAGCAATGGGCAGCCGGAGAACAACTACAAGACCACGCCTCCCGTGCTGGACTCCGACGGCTCCTTCTTCCTCT
ATAGCAAGCTCACCGTGGACAAGAGCAGGTGGCAGCAGGGGAACGTCTTCTCATGCTCCGTGATGCATGAGGCTCTG
CACAACCACTACACGCAGAAGAGCCTCTCCCTGTCTCCGGGTGGCGGTGGAGGGTCCGGCGGTGGTGGATCCGAGGT
GCAGCTGGTGGAGTCTGGGGGAGGCTTGGTCCAGCCTGGGGGGTCCCTGAGACTCTCCTGTGCAGCCTCTGGATTCA
CCATCAGTACCAATGCAATGAGCTGGGTCCGCCAGGCTCCAGGGAAGGGGCTGGAGTGGATCGGAGTCATTACTGGT
CGTGATATCACATACTACGCGAGCTGGGCGAAAGGCAGATTCACCATCTCCAGAGACAATTCCAAGAACACGCTGTA
TCTTCAAATGAACAGCCTGAGAGCCGAGGACACGGCTGTGTATTACTGTGCGAGAGACGGTGGTTCTTCTGCTATTA
CTAGTAACAACATTTGGGGCCAGGGAACCCTGGTCACCGTCTCTTCAGGCGGTGGCGGTAGTGGGGGAGGCGGTTCT
GGCGGCGGAGGGTCCGGCGGTGGAGGATCAGACGTCGTGATGACCCAGTCTCCTTCCACCCTGTCTGCATCTGTAGG
AGACAGAGTCACCATCAATTGCCAAGCCAGTGAGAGCATTAGCAGTTGGTTAGCCTGGTATCAGCAGAAACCAGGGA
AAGCCCCTAAGCTCCTGATCTATGAAGCATCCAAACTGGCATCTGGGGTCCCATCAAGGTTCAGCGGCAGTGGATCT
GGGACAGAATTTACTCTCACCATCAGCAGCCTGCAGCCTGATGATTTTGCAACTTATTACTGCCAAGGCTATTTTTA
TTTTATTAGTCGTACTTATGTAAATTCTTTCGGCGGAGGGACCAAGGTGGAGATCAAAGGCGGTGGAGGGTCCGGCG
GTGGTGGCTCCGGATTTCTTAATTCCCTTTTCAACCAAGAGGTTCAGATCCCCTTGACTGAAAGCTATTGCGGCCCT
TGTCCGAAAAACTGGATATGTTACAAGAATAATTGTTACCAATTCTTCGACGAAAGCAAGAACTGGTATGAGAGTCA
GGCGTCTTGTATGAGTCAGAATGCCAGCCTGCTTAAGGTTTATTCAAAAGAAGACCAGGATCTGCTTAAGTTGGTAA
AGAGCTACCACTGGATGGGGCTGGTACATATCCCAACGAATGGGTCATGGCAGTGGGAGGACGGTTCTATTCTGAGT
CCAAATCTCCTGACGATCATCGAAATGCAGAAAGGGGACTGTGCCCTGTATGCATCATCCTTCAAGGGGTACATCGA
GAACTGCAGTACCCCAAATACCTACATTTGTATGCAAAGAACGGTTGGAGGCGGTGGCTCAGGCGGAGGCGGCTCAG
GAGGTGGCGGTTCAGGAGGCGGCGGATCTTTCCTAAACTCATTATTCAACCAAGAAGTTCAAATTCCCTTGACCGAA
AGTTACTGTGGCCCATGTCCTAAAAACTGGATATGTTACAAAAATAACTGCTACCAATTTTTTGATGAGAGTAAAAA
CTGGTATGAGAGCCAGGCTTCTTGTATGTCTCAAAATGCCAGCCTTCTGAAAGTATACAGCAAAGAGGACCAGGATT
TACTTAAACTGGTGAAGTCATATCATTGGATGGGACTAGTACACATTCCAACAAATGGATCTTGGCAGTGGGAAGAT
GGCTCCATTCTCTCACCCAACCTACTAACAATAATTGAAATGCAGAAGGGAGACTGTGCACTCTATGCCTCGAGCTT
TAAAGGCTATATAGAAAACTGTTCAACTCCAAATACGTACATCTGCATGCAAAGGACTGTGTAA
>SEQ ID 10 SI-49E3 chain A aa
DVVMTQSPSSVSASVGDRVTITCQASQNIRTYLSWYQQKPGKAPKLLIYAAANLASGVPSRFSGSGSGTDFTLTISD
LEPGDAATYYCQSTYLGTDYVGGAFGGGTKVEIKGGGGSGGGGSGGGGSGGGGSRSLVESGGGLVQPGGSLRLSCTA
SGFTISSYHMQWVRQAPGKGLEYIGTISSGGNVYYASSARGRFTISRPSSKNTVDLQMNSLRAEDTAVYYCARDSGY
SDPMWGQGTLVTVSTGGGGSGGGGSEVQLLESGGGLVQPGGSLRLSCAASGFSFSSGYDMCWVRQAPGKGLEWIACI
AAGSAGITYDANWAKGRFTISRDNSKNTLYLQMNSLRAEDTAVYYCARSAFSFDYAMDLWGQGTLVTVSSASTKGPS
VFPLAPSSKSTSGGTAALGCLVKDYFPEPVTVSWNSGALTSGVHTFPAVLQSSGLYSLSSVVTVPSSSLGTQTYICN
VNHKPSNTKVDKRVEPKSCDKTHTCPPCPAPEAAGAPSVFLFPPKPKDTLMISRTPEVTCVVVDVSHEDPEVKFNWY
VDGVEVHNAKTKPREEQYNSTYRVVSVLTVLHQDWLNGKEYKCAVSNKALPAPIEKTISKAKGQPREPQVYTLPPSR
DELTKNQVSLTCLVKGFYPSDIAVEWESNGQPENNYKTTPPVLDSDGSFFLYSKLTVDKSRWQQGNVFSCSVMHEAL
HNHYTQKSLSLSPGGGGGSGGGGSEVQLVESGGGLVQPGGSLRLSCAASGFTISTNAMSWVRQAPGKGLEWIGVITG
RDITYYASWAKGRFTISRDNSKNTLYLQMNSLRAEDTAVYYCARDGGSSAITSNNIWGQGTLVTVSSGGGGSGGGGS
GGGGSGGGGSDVVMTQSPSTLSASVGDRVTINCQASESISSWLAWYQQKPGKAPKLLIYEASKLASGVPSRFSGSGS
GTEFTLTISSLQPDDFATYYCQGYFYFISRTYVNSFGGGTKVEIKGGGGSGGGGSGFLNSLFNQEVQIPLTESYCGP
CPKNWICYKNNCYQFFDESKNWYESQASCMSQNASLLKVYSKEDQDLLKLVKSYHWMGLVHIPTNGSWQWEDGSILS
PNLLTIIEMQKGDCALYASSFKGYIENCSTPNTYICMQRTVGGGGSGGGGSGGGGSGGGGSFLNSLFNQEVQIPLTE
SYCGPCPKNWICYKNNCYQFFDESKNWYESQASCMSQNASLLKVYSKEDQDLLKLVKSYHWMGLVHIPTNGSWQWED
GSILSPNLLTIIEMQKGDCALYASSFKGYIENCSTPNTYICMQRTV
>SEQ ID 11 SI-49E3 chain B nt
GACATCCAGATGACCCAGTCTCCTTCCACCCTGTCTGCATCTGTAGGAGACAGAGTCACCATCACTTGCCAGGCCAG
TCAGAGCATTAGTTCCCACTTAAACTGGTATCAGCAGAAACCAGGGAAAGCCCCTAAGCTCCTGATCTATAAGGCAT
CCACTCTGGCATCTGGGGTCCCATCAAGGTTCAGCGGCAGTGGATCTGGGACAGAATTTACTCTCACCATCAGCAGC
CTGCAGCCTGATGATTTTGCAACTTATTACTGCCAACAGGGTTATAGTTGGGGTAATGTTGATAATGTTTTCGGCGG
AGGGACCAAGGTGGAGATCAAACGTACGGTGGCTGCACCATCTGTCTTCATCTTCCCGCCATCTGATGAGCAGTTGA
AATCTGGAACTGCCTCTGTTGTGTGCCTGCTGAATAACTTCTATCCCAGAGAGGCCAAAGTACAGTGGAAGGTGGAT
AACGCCCTCCAATCGGGTAACTCCCAGGAGAGTGTCACAGAGCAGGACAGCAAGGACAGCACCTACAGCCTCAGCAG
CACCCTGACGCTGAGCAAAGCAGACTACGAGAAACACAAAGTCTACGCCTGCGAAGTCACCCATCAGGGCCTGAGCT
CGCCCGTCACAAAGAGCTTCAACAGGGGAGAGTGT
>SEQ ID 12 SI-49E3 chain B aa
DIQMTQSPSTLSASVGDRVTITCQASQSISSHLNWYQQKPGKAPKLLIYKASTLASGVPSRFSGSGSGTEFTLTISS
LQPDDFATYYCQQGYSWGNVDNVFGGGTKVEIKRTVAAPSVFIFPPSDEQLKSGTASVVCLLNNFYPREAKVQWKVD
NALQSGNSQESVTEQDSKDSTYSLSSTLTLSKADYEKHKVYACEVTHQGLSSPVTKSFNRGEC
>SEQ ID 13 SI-49E4 chain A nt
GACATCCAGATGACCCAGTCTCCTTCCACCCTGTCTGCATCTGTAGGAGACAGAGTCACCATCACTTGCCAGGCCAG
TCAGAGCATTAGTTCCCACTTAAACTGGTATCAGCAGAAACCAGGGAAAGCCCCTAAGCTCCTGATCTATAAGGCAT
CCACTCTGGCATCTGGGGTCCCATCAAGGTTCAGCGGCAGTGGATCTGGGACAGAATTTACTCTCACCATCAGCAGC
CTGCAGCCTGATGATTTTGCAACTTATTACTGCCAACAGGGTTATAGTTGGGGTAATGTTGATAATGTTTTCGGCGG
AGGGACCAAGGTGGAGATCAAAGGCGGTGGCGGTAGTGGGGGAGGCGGTTCTGGCGGCGGAGGGTCCGGCGGTGGAG
GATCAGAGGTGCAGCTGTTGGAGTCTGGGGGAGGCTTGGTACAGCCTGGGGGGTCCCTGAGACTCTCCTGTGCAGCC
TCTGGATTCTCCTTCAGTAGCGGGTACGACATGTGCTGGGTCCGCCAGGCTCCAGGGAAGGGGCTGGAGTGGATCGC
ATGTATTGCTGCTGGTAGTGCTGGTATCACTTACGACGCGAACTGGGCGAAAGGCCGGTTCACCATCTCCAGAGACA
ATTCCAAGAACACGCTGTATCTGCAAATGAACAGCCTGAGAGCCGAGGACACGGCCGTATATTACTGTGCGAGATCG
GCGTTTTCGTTCGACTACGCCATGGACCTCTGGGGCCAGGGAACCCTGGTCACCGTGTCGACAGGCGGTGGAGGGTC
CGGCGGTGGTGGATCACGGTCGCTGGTGGAGTCTGGGGGAGGCTTGGTCCAGCCTGGGGGGTCCCTGAGACTCTCCT
GTACTGCCTCTGGATTCACCATCAGTAGCTACCACATGCAGTGGGTCCGCCAGGCTCCAGGGAAGGGGCTGGAGTAC
ATCGGAACCATTAGTAGTGGTGGTAATGTATACTACGCAAGCTCCGCTAGAGGCAGATTCACCATCTCCAGACCCTC
GTCCAAGAACACGGTGGATCTTCAAATGAACAGCCTGAGAGCCGAGGACACGGCTGTGTATTACTGTGCGAGAGACT
CTGGTTATAGTGATCCTATGTGGGGCCAGGGAACCCTGGTCACCGTCTCTTCAGCTAGCACCAAGGGCCCATCGGTC
TTCCCCCTGGCACCCTCCTCCAAGAGCACCTCTGGGGGCACAGCGGCCCTGGGCTGCCTGGTCAAGGACTACTTCCC
CGAACCGGTGACGGTGTCGTGGAACTCAGGCGCCCTGACCAGCGGCGTGCACACCTTCCCGGCTGTCCTACAGTCCT
CAGGACTCTACTCCCTCAGCAGCGTGGTGACCGTGCCCTCCAGCAGCTTGGGCACCCAGACCTACATCTGCAACGTG
AATCACAAGCCCAGCAACACCAAGGTGGACAAGAGAGTTGAGCCCAAATCTTGTGACAAAACTCACACATGCCCACC
GTGCCCAGCACCTGAAGCCGCGGGGGCACCGTCAGTCTTCCTCTTCCCCCCAAAACCCAAGGACACCCTCATGATCT
CCCGGACCCCTGAGGTCACATGCGTGGTGGTGGACGTGAGCCACGAAGACCCTGAGGTCAAGTTCAACTGGTACGTG
GACGGCGTGGAGGTGCATAATGCCAAGACAAAGCCGCGGGAGGAGCAGTACAACAGCACGTACCGTGTGGTCAGCGT
CCTCACCGTCCTGCACCAGGACTGGCTGAATGGCAAGGAGTACAAGTGCGCGGTCTCCAACAAAGCCCTCCCAGCCC
CCATCGAGAAAACCATCTCCAAAGCCAAAGGGCAGCCCCGAGAACCACAGGTGTACACCCTGCCCCCATCCCGGGAT
GAGCTGACCAAGAACCAGGTCAGCCTGACCTGCCTGGTCAAAGGCTTCTATCCCAGCGACATCGCCGTGGAGTGGGA
GAGCAATGGGCAGCCGGAGAACAACTACAAGACCACGCCTCCCGTGCTGGACTCCGACGGCTCCTTCTTCCTCTATA
GCAAGCTCACCGTGGACAAGAGCAGGTGGCAGCAGGGGAACGTCTTCTCATGCTCCGTGATGCATGAGGCTCTGCAC
AACCACTACACGCAGAAGAGCCTCTCCCTGTCTCCGGGTGGCGGTGGAGGGTCCGGCGGTGGTGGATCCGAGGTGCA
GCTGGTGGAGTCTGGGGGAGGCTTGGTCCAGCCTGGGGGGTCCCTGAGACTCTCCTGTGCAGCCTCTGGATTCACCA
TCAGTACCAATGCAATGAGCTGGGTCCGCCAGGCTCCAGGGAAGGGGCTGGAGTGGATCGGAGTCATTACTGGTCGT
GATATCACATACTACGCGAGCTGGGCGAAAGGCAGATTCACCATCTCCAGAGACAATTCCAAGAACACGCTGTATCT
TCAAATGAACAGCCTGAGAGCCGAGGACACGGCTGTGTATTACTGTGCGAGAGACGGTGGTTCTTCTGCTATTACTA
GTAACAACATTTGGGGCCAGGGAACCCTGGTCACCGTCTCTTCAGGCGGTGGCGGTAGTGGGGGAGGCGGTTCTGGC
GGCGGAGGGTCCGGCGGTGGAGGATCAGACGTCGTGATGACCCAGTCTCCTTCCACCCTGTCTGCATCTGTAGGAGA
CAGAGTCACCATCAATTGCCAAGCCAGTGAGAGCATTAGCAGTTGGTTAGCCTGGTATCAGCAGAAACCAGGGAAAG
CCCCTAAGCTCCTGATCTATGAAGCATCCAAACTGGCATCTGGGGTCCCATCAAGGTTCAGCGGCAGTGGATCTGGG
ACAGAATTTACTCTCACCATCAGCAGCCTGCAGCCTGATGATTTTGCAACTTATTACTGCCAAGGCTATTTTTATTT
TATTAGTCGTACTTATGTAAATTCTTTCGGCGGAGGGACCAAGGTGGAGATCAAAGGCGGTGGAGGGTCCGGCGGTG
GTGGCTCCGGATTTCTTAATTCCCTTTTCAACCAAGAGGTTCAGATCCCCTTGACTGAAAGCTATTGCGGCCCTTGT
CCGAAAAACTGGATATGTTACAAGAATAATTGTTACCAATTCTTCGACGAAAGCAAGAACTGGTATGAGAGTCAGGC
GTCTTGTATGAGTCAGAATGCCAGCCTGCTTAAGGTTTATTCAAAAGAAGACCAGGATCTGCTTAAGTTGGTAAAGA
GCTACCACTGGATGGGGCTGGTACATATCCCAACGAATGGGTCATGGCAGTGGGAGGACGGTTCTATTCTGAGTCCA
AATCTCCTGACGATCATCGAAATGCAGAAAGGGGACTGTGCCCTGTATGCATCATCCTTCAAGGGGTACATCGAGAA
CTGCAGTACCCCAAATACCTACATTTGTATGCAAAGAACGGTTGGAGGCGGTGGCTCAGGCGGAGGCGGCTCAGGAG
GTGGCGGTTCAGGAGGCGGCGGATCTTTCCTAAACTCATTATTCAACCAAGAAGTTCAAATTCCCTTGACCGAAAGT
TACTGTGGCCCATGTCCTAAAAACTGGATATGTTACAAAAATAACTGCTACCAATTTTTTGATGAGAGTAAAAACTG
GTATGAGAGCCAGGCTTCTTGTATGTCTCAAAATGCCAGCCTTCTGAAAGTATACAGCAAAGAGGACCAGGATTTAC
TTAAACTGGTGAAGTCATATCATTGGATGGGACTAGTACACATTCCAACAAATGGATCTTGGCAGTGGGAAGATGGC
TCCATTCTCTCACCCAACCTACTAACAATAATTGAAATGCAGAAGGGAGACTGTGCACTCTATGCCTCGAGCTTTAA
AGGCTATATAGAAAACTGTTCAACTCCAAATACGTACATCTGCATGCAAAGGACTGTG
>SEQ ID 14 SI-49E4 chain A aa
DIQMTQSPSTLSASVGDRVTITCQASQSISSHLNWYQQKPGKAPKLLIYKASTLASGVPSRFSGSGSGTEFTLTISS
LQPDDFATYYCQQGYSWGNVDNVFGGGTKVEIKGGGGSGGGGSGGGGSGGGGSEVQLLESGGGLVQPGGSLRLSCAA
SGFSFSSGYDMCWVRQAPGKGLEWIACIAAGSAGITYDANWAKGRFTISRDNSKNTLYLQMNSLRAEDTAVYYCARS
AFSFDYAMDLWGQGTLVTVSTGGGGSGGGGSRSLVESGGGLVQPGGSLRLSCTASGFTISSYHMQWVRQAPGKGLEY
IGTISSGGNVYYASSARGRFTISRPSSKNTVDLQMNSLRAEDTAVYYCARDSGYSDPMWGQGTLVTVSSASTKGPSV
FPLAPSSKSTSGGTAALGCLVKDYFPEPVTVSWNSGALTSGVHTFPAVLQSSGLYSLSSVVTVPSSSLGTQTYICNV
NHKPSNTKVDKRVEPKSCDKTHTCPPCPAPEAAGAPSVFLFPPKPKDTLMISRTPEVTCVVVDVSHEDPEVKFNWYV
DGVEVHNAKTKPREEQYNSTYRVVSVLTVLHQDWLNGKEYKCAVSNKALPAPIEKTISKAKGQPREPQVYTLPPSRD
ELTKNQVSLTCLVKGFYPSDIAVEWESNGQPENNYKTTPPVLDSDGSFFLYSKLTVDKSRWQQGNVFSCSVMHEALH
NHYTQKSLSLSPGGGGGSGGGGSEVQLVESGGGLVQPGGSLRLSCAASGFTISTNAMSWVRQAPGKGLEWIGVITGR
DITYYASWAKGRFTISRDNSKNTLYLQMNSLRAEDTAVYYCARDGGSSAITSNNIWGQGTLVTVSSGGGGSGGGGSG
GGGSGGGGSDVVMTQSPSTLSASVGDRVTINCQASESISSWLAWYQQKPGKAPKLLIYEASKLASGVPSRFSGSGSG
TEFTLTISSLQPDDFATYYCQGYFYFISRTYVNSFGGGTKVEIKGGGGSGGGGSGFLNSLFNQEVQIPLTESYCGPC
PKNWICYKNNCYQFFDESKNWYESQASCMSQNASLLKVYSKEDQDLLKLVKSYHWMGLVHIPTNGSWQWEDGSILSP
NLLTIIEMQKGDCALYASSFKGYIENCSTPNTYICMQRTVGGGGSGGGGSGGGGSGGGGSFLNSLFNQEVQIPLTES
YCGPCPKNWICYKNNCYQFFDESKNWYESQASCMSQNASLLKVYSKEDQDLLKLVKSYHWMGLVHIPTNGSWQWEDG
SILSPNLLTIIEMQKGDCALYASSFKGYIENCSTPNTYICMQRTV
>SEQ ID 15 SI-49E4 chain B nt
GACGTTGTGATGACCCAGTCTCCATCTTCCGTGTCTGCATCTGTAGGAGACAGAGTCACCATCACCTGTCAGGCCAG
TCAGAACATTAGGACTTACTTATCCTGGTATCAGCAGAAACCAGGGAAAGCCCCTAAGCTCCTGATCTATGCTGCAG
CCAATCTGGCATCTGGGGTCCCATCAAGGTTCAGCGGCAGTGGATCTGGGACAGATTTCACTCTCACCATCAGCGAC
CTGGAGCCTGGCGATGCTGCAACTTACTATTGTCAGTCTACCTATCTTGGTACTGATTATGTTGGCGGTGCTTTCGG
CGGAGGGACCAAGGTGGAGATCAAACGTACGGTGGCTGCACCATCTGTCTTCATCTTCCCGCCATCTGATGAGCAGT
TGAAATCTGGAACTGCCTCTGTTGTGTGCCTGCTGAATAACTTCTATCCCAGAGAGGCCAAAGTACAGTGGAAGGTG
GATAACGCCCTCCAATCGGGTAACTCCCAGGAGAGTGTCACAGAGCAGGACAGCAAGGACAGCACCTACAGCCTCAG
CAGCACCCTGACGCTGAGCAAAGCAGACTACGAGAAACACAAAGTCTACGCCTGCGAAGTCACCCATCAGGGCCTGA
GCTCGCCCGTCACAAAGAGCTTCAACAGGGGAGAGTGT
>SEQ ID 16 SI-49E4 chain B aa
DVVMTQSPSSVSASVGDRVTITCQASQNIRTYLSWYQQKPGKAPKLLIYAAANLASGVPSRFSGSGSGTDFTLTISD
LEPGDAATYYCQSTYLGTDYVGGAFGGGTKVEIKRTVAAPSVFIFPPSDEQLKSGTASVVCLLNNFYPREAKVQWKV
DNALQSGNSQESVTEQDSKDSTYSLSSTLTLSKADYEKHKVYACEVTHQGLSSPVTKSFNRGEC
>SEQ ID 17 SI-49E11 chain A nt
TTTCTTAATTCCCTTTTCAACCAAGAGGTTCAGATCCCCTTGACTGAAAGCTATTGCGGCCCTTGTCCGAAAAACTG
GATATGTTACAAGAATAATTGTTACCAATTCTTCGACGAAAGCAAGAACTGGTATGAGAGTCAGGCGTCTTGTATGA
GTCAGAATGCCAGCCTGCTTAAGGTTTATTCAAAAGAAGACCAGGATCTGCTTAAGTTGGTAAAGAGCTACCACTGG
ATGGGGCTGGTACATATCCCAACGAATGGGTCATGGCAGTGGGAGGACGGTTCTATTCTGAGTCCAAATCTCCTGAC
GATCATCGAAATGCAGAAAGGGGACTGTGCCCTGTATGCATCATCCTTCAAGGGGTACATCGAGAACTGCAGTACCC
CAAATACCTACATTTGTATGCAAAGAACGGTTGGAGGCGGTGGCTCAGGCGGAGGCGGCTCAGGAGGTGGCGGTTCA
GGAGGCGGCGGATCTTTCCTAAACTCATTATTCAACCAAGAAGTTCAAATTCCCTTGACCGAAAGTTACTGTGGCCC
ATGTCCTAAAAACTGGATATGTTACAAAAATAACTGCTACCAATTTTTTGATGAGAGTAAAAACTGGTATGAGAGCC
AGGCTTCTTGTATGTCTCAAAATGCCAGCCTTCTGAAAGTATACAGCAAAGAGGACCAGGATTTACTTAAACTGGTG
AAGTCATATCATTGGATGGGACTAGTACACATTCCAACAAATGGATCTTGGCAGTGGGAAGATGGCTCCATTCTCTC
ACCCAACCTACTAACAATAATTGAAATGCAGAAGGGAGACTGTGCACTCTATGCCTCGAGCTTTAAAGGCTATATAG
AAAACTGTTCAACTCCAAATACGTACATCTGCATGCAAAGGACTGTGGTCGACGGCGGTGGAGGGTCCGGCGGTGGT
GGATCAGAGGTGCAGCTGGTGGAGTCTGGGGGAGGCTTGGTCCAGCCTGGGGGGTCCCTGAGACTCTCCTGTGCAGC
CTCTGGATTCACCATCAGTACCAATGCAATGAGCTGGGTCCGCCAGGCTCCAGGGAAGGGGCTGGAGTGGATCGGAG
TCATTACTGGTCGTGATATCACATACTACGCGAGCTGGGCGAAAGGCAGATTCACCATCTCCAGAGACAATTCCAAG
AACACGCTGTATCTTCAAATGAACAGCCTGAGAGCCGAGGACACGGCTGTGTATTACTGTGCGAGAGACGGTGGTTC
TTCTGCTATTACTAGTAACAACATTTGGGGCCAGGGAACCCTGGTCACCGTGTCCTCAGCTAGCACCAAGGGCCCAT
CGGTCTTCCCCCTGGCACCCTCCTCCAAGAGCACCTCTGGGGGCACAGCGGCCCTGGGCTGCCTGGTCAAGGACTAC
TTCCCCGAACCGGTGACGGTGTCGTGGAACTCAGGCGCCCTGACCAGCGGCGTGCACACCTTCCCGGCTGTCCTACA
GTCCTCAGGACTCTACTCCCTCAGCAGCGTGGTGACCGTGCCCTCCAGCAGCTTGGGCACCCAGACCTACATCTGCA
ACGTGAATCACAAGCCCAGCAACACCAAGGTGGACAAGAGAGTTGAGCCCAAATCTTGTGACAAAACTCACACATGC
CCACCGTGCCCAGCACCTGAAGCCGCGGGGGCACCGTCAGTCTTCCTCTTCCCCCCAAAACCCAAGGACACCCTCAT
GATCTCCCGGACCCCTGAGGTCACATGCGTGGTGGTGGACGTGAGCCACGAAGACCCTGAGGTCAAGTTCAACTGGT
ACGTGGACGGCGTGGAGGTGCATAATGCCAAGACAAAGCCGCGGGAGGAGCAGTACAACAGCACGTACCGTGTGGTC
AGCGTCCTCACCGTCCTGCACCAGGACTGGCTGAATGGCAAGGAGTACAAGTGCGCGGTCTCCAACAAAGCCCTCCC
AGCCCCCATCGAGAAAACCATCTCCAAAGCCAAAGGGCAGCCCCGAGAACCACAGGTGTACACCCTGCCCCCATCCC
GGGATGAGCTGACCAAGAACCAGGTCAGCCTGACCTGCCTGGTCAAAGGCTTCTATCCCAGCGACATCGCCGTGGAG
TGGGAGAGCAATGGGCAGCCGGAGAACAACTACAAGACCACGCCTCCCGTGCTGGACTCCGACGGCTCCTTCTTCCT
CTATAGCAAGCTCACCGTGGACAAGAGCAGGTGGCAGCAGGGGAACGTCTTCTCATGCTCCGTGATGCATGAGGCTC
TGCACAACCACTACACGCAGAAGAGCCTCTCCCTGTCTCCGGGTGGCGGTGGAGGGTCCGGCGGTGGTGGATCCGAG
GTGCAGCTGTTGGAGTCTGGGGGAGGCTTGGTACAGCCTGGGGGGTCCCTGAGACTCTCCTGTGCAGCCTCTGGATT
CTCCTTCAGTAGCGGGTACGACATGTGCTGGGTCCGCCAGGCTCCAGGGAAGGGGCTGGAGTGGATCGCATGCATTG
CTGCTGGTAGTGCTGGTATCACTTACGACGCGAACTGGGCGAAAGGCCGGTTCACCATCTCCAGAGACAATTCCAAG
AACACGCTGTATCTGCAAATGAACAGCCTGAGAGCCGAGGACACGGCCGTATATTACTGTGCGAGATCGGCGTTTTC
GTTCGACTACGCCATGGACCTCTGGGGCCAGGGAACCCTGGTCACCGTCTCGAGCGGTGGAGGCGGATCTGGCGGAG
GTGGTTCCGGCGGTGGCGGCTCCGGTGGAGGCGGCTCTGACATCCAGATGACCCAGTCTCCTTCCACCCTGTCTGCA
TCTGTAGGAGACAGAGTCACCATCACTTGCCAGGCCAGTCAGAGCATTAGTTCCCACTTAAACTGGTATCAGCAGAA
ACCAGGGAAAGCCCCTAAGCTCCTGATCTATAAGGCATCCACTCTGGCATCTGGGGTCCCATCAAGGTTCAGCGGCA
GTGGATCTGGGACAGAATTTACTCTCACCATCAGCAGCCTGCAGCCTGATGATTTTGCAACTTATTACTGCCAACAG
GGTTATAGTTGGGGTAATGTTGATAATGTTTTCGGCGGAGGGACCAAGGTGGAGATCAAAGGCGGTGGAGGGTCCGG
CGGTGGTGGCTCCGGACGAGAGGGCCCCGAGCTGTCTCCTGATGACCCAGCAGGCCTCTTGGACTTGCGGCAGGGTA
TGTTCGCTCAACTTGTGGCTCAGAATGTTCTGCTCATTGATGGACCACTCTCTTGGTATAGTGACCCCGGTCTGGCC
GGGGTGAGTCTGACCGGCGGGCTCTCTTATAAAGAGGATACTAAGGAACTGGTCGTAGCAAAAGCGGGCGTTTATTA
CGTTTTTTTTCAGCTGGAGCTCAGGCGCGTGGTGGCCGGCGAGGGCAGTGGCTCTGTGTCCCTGGCCCTGCACTTAC
AGCCCTTGAGAAGCGCTGCAGGTGCTGCCGCACTGGCTTTAACTGTTGACCTCCCTCCGGCCTCTTCTGAAGCTAGA
AACAGCGCTTTCGGCTTCCAAGGGCGCCTGCTGCACCTGAGCGCAGGCCAGCGCTTAGGTGTGCACCTTCATACAGA
GGCCAGGGCCCGACACGCTTGGCAGCTCACACAGGGTGCCACGGTTCTCGGACTTTTCCGCGTTACTCCCGAGATCC
CCGCTGGCCTCGGAAGTACTGGTTCTGGGTCTAAACCCGGTTCCGGCGAAGGTAGTACTAAAGGACGAGAAGGGCCA
GAGTTAAGTCCAGATGACCCTGCTGGGCTTTTGGACCTGCGGCAGGGCATGTTCGCTCAACTGGTGGCTCAGAACGT
GCTGCTGATCGATGGCCCCCTGAGTTGGTACAGCGATCCCGGGCTGGCAGGCGTGTCACTTACAGGGGGCCTCTCTT
ACAAGGAAGACACCAAGGAGTTAGTGGTCGCTAAGGCTGGCGTGTATTACGTGTTCTTCCAACTGGAGCTGAGAAGG
GTTGTGGCAGGAGAGGGTAGCGGCAGCGTGTCTTTAGCCCTTCACTTGCAGCCCCTGAGGTCTGCTGCAGGTGCAGC
CGCTCTCGCGCTCACCGTGGATCTCCCCCCAGCCTCATCTGAAGCTAGGAACAGTGCATTTGGCTTTCAGGGACGCT
TGCTGCACCTCTCCGCTGGACAGAGGCTGGGCGTGCACCTTCACACAGAGGCCCGTGCCAGGCATGCATGGCAGCTC
ACTCAGGGGGCAACAGTGCTGGGTCTCTTCCGCGTGACTCCTGAAATACCAGCTGGACTTGGCGGTGGAGGCAGCGG
CGGAGGAGGATCTCGTGAGGGGCCAGAACTGTCCCCCGATGACCCAGCCGGACTGCTCGATCTCAGACAGGGCATGT
TCGCTCAGCTTGTAGCCCAAAATGTCCTCCTGATTGACGGCCCTTTGAGCTGGTATAGTGATCCCGGCTTGGCCGGG
GTATCTCTGACCGGAGGCCTCTCCTACAAGGAAGACACCAAAGAGCTGGTGGTGGCAAAAGCGGGGGTGTATTATGT
GTTCTTTCAGCTCGAGCTGCGGAGAGTTGTGGCCGGGGAAGGGTCTGGGAGCGTATCTCTTGCACTTCACCTGCAGC
CCCTGCGCAGCGCCGCTGGAGCCGCCGCCCTTGCTCTTACTGTGGATCTGCCTCCTGCTTCCTCAGAAGCACGCAAC
AGCGCCTTCGGCTTTCAAGGACGTCTCCTGCACTTGTCCGCAGGACAGAGGTTGGGCGTCCATTTACACACTGAGGC
ACGGGCACGGCACGCTTGGCAGCTTACCCAGGGAGCCACCGTGCTGGGACTCTTTAGAGTGACACCCGAGATCCCCG
CTGGCTTG
>SEQ ID 18 SI-49E11 chain A aa
FLNSLFNQEVQIPLTESYCGPCPKNWICYKNNCYQFFDESKNWYESQASCMSQNASLLKVYSKEDQDLLKLVKSYHW
MGLVHIPTNGSWQWEDGSILSPNLLTIIEMQKGDCALYASSFKGYIENCSTPNTYICMQRTVGGGGSGGGGSGGGGS
GGGGSFLNSLFNQEVQIPLTESYCGPCPKNWICYKNNCYQFFDESKNWYESQASCMSQNASLLKVYSKEDQDLLKLV
KSYHWMGLVHIPTNGSWQWEDGSILSPNLLTIIEMQKGDCALYASSFKGYIENCSTPNTYICMQRTVVDGGGGSGGG
GSEVQLVESGGGLVQPGGSLRLSCAASGFTISTNAMSWVRQAPGKGLEWIGVITGRDITYYASWAKGRFTISRDNSK
NTLYLQMNSLRAEDTAVYYCARDGGSSAITSNNIWGQGTLVTVSSASTKGPSVFPLAPSSKSTSGGTAALGCLVKDY
FPEPVTVSWNSGALTSGVHTFPAVLQSSGLYSLSSVVTVPSSSLGTQTYICNVNHKPSNTKVDKRVEPKSCDKTHTC
PPCPAPEAAGAPSVFLFPPKPKDTLMISRTPEVTCVVVDVSHEDPEVKFNWYVDGVEVHNAKTKPREEQYNSTYRVV
SVLTVLHQDWLNGKEYKCAVSNKALPAPIEKTISKAKGQPREPQVYTLPPSRDELTKNQVSLTCLVKGFYPSDIAVE
WESNGQPENNYKTTPPVLDSDGSFFLYSKLTVDKSRWQQGNVFSCSVMHEALHNHYTQKSLSLSPGGGGGSGGGGSE
VQLLESGGGLVQPGGSLRLSCAASGFSFSSGYDMCWVRQAPGKGLEWIACIAAGSAGITYDANWAKGRETISRDNSK
NTLYLQMNSLRAEDTAVYYCARSAFSFDYAMDLWGQGTLVTVSSGGGGSGGGGSGGGGSGGGGSDIQMTQSPSTLSA
SVGDRVTITCQASQSISSHLNWYQQKPGKAPKLLIYKASTLASGVPSRFSGSGSGTEFTLTISSLQPDDFATYYCQQ
GYSWGNVDNVFGGGTKVEIKGGGGSGGGGSGREGPELSPDDPAGLLDLRQGMFAQLVAQNVLLIDGPLSWYSDPGLA
GVSLTGGLSYKEDTKELVVAKAGVYYVFFQLELRRVVAGEGSGSVSLALHLQPLRSAAGAAALALTVDLPPASSEAR
NSAFGFQGRLLHLSAGQRLGVHLHTEARARHAWQLTQGATVLGLFRVTPEIPAGLGSTGSGSKPGSGEGSTKGREGP
ELSPDDPAGLLDLRQGMFAQLVAQNVLLIDGPLSWYSDPGLAGVSLTGGLSYKEDTKELVVAKAGVYYVFFQLELRR
VVAGEGSGSVSLALHLQPLRSAAGAAALALTVDLPPASSEARNSAFGFQGRLLHLSAGQRLGVHLHTEARARHAWQL
TQGATVLGLFRVTPEIPAGLGGGGSGGGGSREGPELSPDDPAGLLDLRQGMFAQLVAQNVLLIDGPLSWYSDPGLAG
VSLTGGLSYKEDTKELVVAKAGVYYVFFQLELRRVVAGEGSGSVSLALHLQPLRSAAGAAALALTVDLPPASSEARN
SAFGFQGRLLHLSAGQRLGVHLHTEARARHAWQLTQGATVLGLFRVTPEIPAGL
>SEQ ID 19 SI-49E11 chain B nt
GACGTCGTGATGACCCAGTCTCCTTCCACCCTGTCTGCATCTGTAGGAGACAGAGTCACCATCAATTGCCAAGCCAG
TGAGAGCATTAGCAGTTGGTTAGCCTGGTATCAGCAGAAACCAGGGAAAGCCCCTAAGCTCCTGATCTATGAAGCAT
CCAAACTGGCATCTGGGGTCCCATCAAGGTTCAGCGGCAGTGGATCTGGGACAGAATTCACTCTCACCATCAGCAGC
CTGCAGCCTGATGATTTTGCAACTTATTACTGCCAAGGCTATTTTTATTTTATTAGTCGTACTTATGTAAATTCTTT
CGGCGGAGGGACCAAGGTGGAGATCAAACGTACGGTGGCTGCACCATCTGTCTTCATCTTCCCGCCATCTGATGAGC
AGTTGAAATCTGGAACTGCCTCTGTTGTGTGCCTGCTGAATAACTTCTATCCCAGAGAGGCCAAAGTACAGTGGAAG
GTGGATAACGCCCTCCAATCGGGTAACTCCCAGGAGAGTGTCACAGAGCAGGACAGCAAGGACAGCACCTACAGCCT
CAGCAGCACCCTGACGCTGAGCAAAGCAGACTACGAGAAACACAAAGTCTACGCCTGCGAAGTCACCCATCAGGGCC
TGAGCTCGCCCGTCACAAAGAGCTTCAACAGGGGAGAGTGT
>SEQ ID 20 SI-49E11 chain B aa
DVVMTQSPSTLSASVGDRVTINCQASESISSWLAWYQQKPGKAPKLLIYEASKLASGVPSRFSGSGSGTEFTLTISS
LQPDDFATYYCQGYFYFISRTYVNSFGGGTKVEIKRTVAAPSVFIFPPSDEQLKSGTASVVCLLNNFYPREAKVQWK
VDNALQSGNSQESVTEQDSKDSTYSLSSTLTLSKADYEKHKVYACEVTHQGLSSPVTKSFNRGEC
>SEQ ID 21 SI-49E12 chain A nt
TTTCTTAATTCCCTTTTCAACCAAGAGGTTCAGATCCCCTTGACTGAAAGCTATTGCGGCCCTTGTCCGAAAAACTG
GATATGTTACAAGAATAATTGTTACCAATTCTTCGACGAAAGCAAGAACTGGTATGAGAGTCAGGCGTCTTGTATGA
GTCAGAATGCCAGCCTGCTTAAGGTTTATTCAAAAGAAGACCAGGATCTGCTTAAGTTGGTAAAGAGCTACCACTGG
ATGGGGCTGGTACATATCCCAACGAATGGGTCATGGCAGTGGGAGGACGGTTCTATTCTGAGTCCAAATCTCCTGAC
GATCATCGAAATGCAGAAAGGGGACTGTGCCCTGTATGCATCATCCTTCAAGGGGTACATCGAGAACTGCAGTACCC
CAAATACCTACATTTGTATGCAAAGAACGGTTGGAGGCGGTGGCTCAGGCGGAGGCGGCTCAGGAGGTGGCGGTTCA
GGAGGCGGCGGATCTTTCCTAAACTCATTATTCAACCAAGAAGTTCAAATTCCCTTGACCGAAAGTTACTGTGGCCC
ATGTCCTAAAAACTGGATATGTTACAAAAATAACTGCTACCAATTTTTTGATGAGAGTAAAAACTGGTATGAGAGCC
AGGCTTCTTGTATGTCTCAAAATGCCAGCCTTCTGAAAGTATACAGCAAAGAGGACCAGGATTTACTTAAACTGGTG
AAGTCATATCATTGGATGGGACTAGTACACATTCCAACAAATGGATCTTGGCAGTGGGAAGATGGCTCCATTCTCTC
ACCCAACCTACTAACAATAATTGAAATGCAGAAGGGAGACTGTGCACTCTATGCCTCGAGCTTTAAAGGCTATATAG
AAAACTGTTCAACTCCAAATACGTACATCTGCATGCAAAGGACTGTGGTCGACGGCGGTGGAGGGTCCGGCGGTGGT
GGATCAGAGGTGCAGCTGGTGGAGTCTGGGGGAGGCTTGGTCCAGCCTGGGGGGTCCCTGAGACTCTCCTGTGCAGC
CTCTGGATTCACCATCAGTACCAATGCAATGAGCTGGGTCCGCCAGGCTCCAGGGAAGGGGCTGGAGTGGATCGGAG
TCATTACTGGTCGTGATATCACATACTACGCGAGCTGGGCGAAAGGCAGATTCACCATCTCCAGAGACAATTCCAAG
AACACGCTGTATCTTCAAATGAACAGCCTGAGAGCCGAGGACACGGCTGTGTATTACTGTGCGAGAGACGGTGGTTC
TTCTGCTATTACTAGTAACAACATTTGGGGCCAGGGAACCCTGGTCACCGTGTCCTCAGCTAGCACCAAGGGCCCAT
CGGTCTTCCCCCTGGCACCCTCCTCCAAGAGCACCTCTGGGGGCACAGCGGCCCTGGGCTGCCTGGTCAAGGACTAC
TTCCCCGAACCGGTGACGGTGTCGTGGAACTCAGGCGCCCTGACCAGCGGCGTGCACACCTTCCCGGCTGTCCTACA
GTCCTCAGGACTCTACTCCCTCAGCAGCGTGGTGACCGTGCCCTCCAGCAGCTTGGGCACCCAGACCTACATCTGCA
ACGTGAATCACAAGCCCAGCAACACCAAGGTGGACAAGAGAGTTGAGCCCAAATCTTGTGACAAAACTCACACATGC
CCACCGTGCCCAGCACCTGAAGCCGCGGGGGCACCGTCAGTCTTCCTCTTCCCCCCAAAACCCAAGGACACCCTCAT
GATCTCCCGGACCCCTGAGGTCACATGCGTGGTGGTGGACGTGAGCCACGAAGACCCTGAGGTCAAGTTCAACTGGT
ACGTGGACGGCGTGGAGGTGCATAATGCCAAGACAAAGCCGCGGGAGGAGCAGTACAACAGCACGTACCGTGTGGTC
AGCGTCCTCACCGTCCTGCACCAGGACTGGCTGAATGGCAAGGAGTACAAGTGCGCGGTCTCCAACAAAGCCCTCCC
AGCCCCCATCGAGAAAACCATCTCCAAAGCCAAAGGGCAGCCCCGAGAACCACAGGTGTACACCCTGCCCCCATCCC
GGGATGAGCTGACCAAGAACCAGGTCAGCCTGACCTGCCTGGTCAAAGGCTTCTATCCCAGCGACATCGCCGTGGAG
TGGGAGAGCAATGGGCAGCCGGAGAACAACTACAAGACCACGCCTCCCGTGCTGGACTCCGACGGCTCCTTCTTCCT
CTATAGCAAGCTCACCGTGGACAAGAGCAGGTGGCAGCAGGGGAACGTCTTCTCATGCTCCGTGATGCATGAGGCTC
TGCACAACCACTACACGCAGAAGAGCCTCTCCCTGTCTCCGGGTGGCGGTGGAGGGTCCGGCGGTGGTGGATCCCGA
GAGGGCCCCGAGCTGTCTCCTGATGACCCAGCAGGCCTCTTGGACTTGCGGCAGGGTATGTTCGCTCAACTTGTGGC
TCAGAATGTTCTGCTCATTGATGGACCACTCTCTTGGTATAGTGACCCCGGTCTGGCCGGGGTGAGTCTGACCGGCG
GGCTCTCTTATAAAGAGGATACTAAGGAACTGGTCGTAGCAAAAGCGGGCGTTTATTACGTTTTTTTTCAGCTGGAG
CTCAGGCGCGTGGTGGCCGGCGAGGGCAGTGGCTCTGTGTCCCTGGCCCTGCACTTACAGCCCTTGAGAAGCGCTGC
AGGTGCTGCCGCACTGGCTTTAACTGTTGACCTCCCTCCGGCCTCTTCTGAAGCTAGAAACAGCGCTTTCGGCTTCC
AAGGGCGCCTGCTGCACCTGAGCGCAGGCCAGCGCTTAGGTGTGCACCTTCATACAGAGGCCAGGGCCCGACACGCT
TGGCAGCTCACACAGGGTGCCACGGTTCTCGGACTTTTCCGCGTTACTCCCGAGATCCCCGCTGGCCTCGGAAGTAC
TGGTTCTGGGTCTAAACCCGGTTCCGGCGAAGGTAGTACTAAAGGACGAGAAGGGCCAGAGTTAAGTCCAGATGACC
CTGCTGGGCTTTTGGACCTGCGGCAGGGCATGTTCGCTCAACTGGTGGCTCAGAACGTGCTGCTGATCGATGGCCCC
CTGAGTTGGTACAGCGATCCCGGGCTGGCAGGCGTGTCACTTACAGGGGGCCTCTCTTACAAGGAAGACACCAAGGA
GTTAGTGGTCGCTAAGGCTGGCGTGTATTACGTGTTCTTCCAACTGGAGCTGAGAAGGGTTGTGGCAGGAGAGGGTA
GCGGCAGCGTGTCTTTAGCCCTTCACTTGCAGCCCCTGAGGTCTGCTGCAGGTGCAGCCGCTCTCGCGCTCACCGTG
GATCTCCCCCCAGCCTCATCTGAAGCTAGGAACAGTGCATTTGGCTTTCAGGGACGCTTGCTGCACCTCTCCGCTGG
ACAGAGGCTGGGCGTGCACCTTCACACAGAGGCCCGTGCCAGGCATGCATGGCAGCTCACTCAGGGGGCAACAGTGC
TGGGTCTCTTCCGCGTGACTCCTGAAATACCAGCTGGACTTGGCGGTGGAGGCAGCGGCGGAGGAGGATCTCGTGAG
GGGCCAGAACTGTCCCCCGATGACCCAGCCGGACTGCTCGATCTCAGACAGGGCATGTTCGCTCAGCTTGTAGCCCA
AAATGTCCTCCTGATTGACGGCCCTTTGAGCTGGTATAGTGATCCCGGCTTGGCCGGGGTATCTCTGACCGGAGGCC
TCTCCTACAAGGAAGACACCAAAGAGCTGGTGGTGGCAAAAGCGGGGGTGTATTATGTGTTCTTTCAGCTCGAGCTG
CGGAGAGTTGTGGCCGGGGAAGGGTCTGGGAGCGTATCTCTTGCACTTCACCTGCAGCCCCTGCGCAGCGCCGCTGG
AGCCGCCGCCCTTGCTCTTACTGTGGATCTGCCTCCTGCTTCCTCAGAAGCACGCAACAGCGCCTTCGGCTTTCAAG
GACGTCTCCTGCACTTGTCCGCAGGACAGAGGTTGGGCGTCCATTTACACACTGAGGCACGGGCACGGCACGCTTGG
CAGCTTACCCAGGGAGCCACCGTGCTGGGACTCTTTAGAGTGACACCCGAGATCCCCGCTGGCTTGGGCGGTGGAGG
GTCCGGCGGTGGTGGCTCCGGAGAGGTGCAGCTGTTGGAGTCTGGGGGAGGCTTGGTACAGCCTGGGGGGTCCCTGA
GACTCTCCTGTGCAGCCTCTGGATTCTCCTTCAGTAGCGGGTACGACATGTGCTGGGTCCGCCAGGCTCCAGGGAAG
GGGCTGGAGTGGATCGCATGCATTGCTGCTGGTAGTGCTGGTATCACTTACGACGCGAACTGGGCGAAAGGCCGGTT
CACCATCTCCAGAGACAATTCCAAGAACACGCTGTATCTGCAAATGAACAGCCTGAGAGCCGAGGACACGGCCGTAT
ATTACTGTGCGAGATCGGCGTTTTCGTTCGACTACGCCATGGACCTCTGGGGCCAGGGAACCCTGGTCACCGTCTCG
AGCGGCGGTGGCGGTAGTGGGGGAGGCGGTTCTGGCGGCGGAGGGTCCGGCGGTGGAGGATCAGACATCCAGATGAC
CCAGTCTCCTTCCACCCTGTCTGCATCTGTAGGAGACAGAGTCACCATCACTTGCCAGGCCAGTCAGAGCATTAGTT
CCCACTTAAACTGGTATCAGCAGAAACCAGGGAAAGCCCCTAAGCTCCTGATCTATAAGGCATCCACTCTGGCATCT
GGGGTCCCATCAAGGTTCAGCGGCAGTGGATCTGGGACAGAATTTACTCTCACCATCAGCAGCCTGCAGCCTGATGA
TTTTGCAACTTATTACTGCCAACAGGGTTATAGTTGGGGTAATGTTGATAATGTTTTCGGCGGAGGGACCAAGGTGG
AGATCAAA
>SEQ ID 22 SI-49E12 chain A aa
FLNSLFNQEVQIPLTESYCGPCPKNWICYKNNCYQFFDESKNWYESQASCMSQNASLLKVYSKEDQDLLKLVKSYHW
MGLVHIPTNGSWQWEDGSILSPNLLTIIEMQKGDCALYASSFKGYIENCSTPNTYICMQRTVGGGGSGGGGSGGGGS
GGGGSFLNSLFNQEVQIPLTESYCGPCPKNWICYKNNCYQFFDESKNWYESQASCMSQNASLLKVYSKEDQDLLKLV
KSYHWMGLVHIPTNGSWQWEDGSILSPNLLTIIEMQKGDCALYASSFKGYIENCSTPNTYICMQRTVVDGGGGSGGG
GSEVQLVESGGGLVQPGGSLRLSCAASGFTISTNAMSWVRQAPGKGLEWIGVITGRDITYYASWAKGRFTISRDNSK
NTLYLQMNSLRAEDTAVYYCARDGGSSAITSNNIWGQGTLVTVSSASTKGPSVFPLAPSSKSTSGGTAALGCLVKDY
FPEPVTVSWNSGALTSGVHTFPAVLQSSGLYSLSSVVTVPSSSLGTQTYICNVNHKPSNTKVDKRVEPKSCDKTHTC
PPCPAPEAAGAPSVFLFPPKPKDTLMISRTPEVTCVVVDVSHEDPEVKFNWYVDGVEVHNAKTKPREEQYNSTYRVV
SVLTVLHQDWLNGKEYKCAVSNKALPAPIEKTISKAKGQPREPQVYTLPPSRDELTKNQVSLTCLVKGFYPSDIAVE
WESNGQPENNYKTTPPVLDSDGSFFLYSKLTVDKSRWQQGNVFSCSVMHEALHNHYTQKSLSLSPGGGGGSGGGGSR
EGPELSPDDPAGLLDLRQGMFAQLVAQNVLLIDGPLSWYSDPGLAGVSLTGGLSYKEDTKELVVAKAGVYYVFFQLE
LRRVVAGEGSGSVSLALHLQPLRSAAGAAALALTVDLPPASSEARNSAFGFQGRLLHLSAGQRLGVHLHTEARARHA
WQLTQGATVLGLFRVTPEIPAGLGSTGSGSKPGSGEGSTKGREGPELSPDDPAGLLDLRQGMFAQLVAQNVLLIDGP
LSWYSDPGLAGVSLTGGLSYKEDTKELVVAKAGVYYVFFQLELRRVVAGEGSGSVSLALHLQPLRSAAGAAALALTV
DLPPASSEARNSAFGFQGRLLHLSAGQRLGVHLHTEARARHAWQLTQGATVLGLFRVTPEIPAGLGGGGSGGGGSRE
GPELSPDDPAGLLDLRQGMFAQLVAQNVLLIDGPLSWYSDPGLAGVSLTGGLSYKEDTKELVVAKAGVYYVFFQLEL
RRVVAGEGSGSVSLALHLQPLRSAAGAAALALTVDLPPASSEARNSAFGFQGRLLHLSAGQRLGVHLHTEARARHAW
QLTQGATVLGLFRVTPEIPAGLGGGGSGGGGSGEVQLLESGGGLVQPGGSLRLSCAASGFSFSSGYDMCWVRQAPGK
GLEWIACIAAGSAGITYDANWAKGRFTISRDNSKNTLYLQMNSLRAEDTAVYYCARSAFSFDYAMDLWGQGTLVTVS
SGGGGSGGGGSGGGGSGGGGSDIQMTQSPSTLSASVGDRVTITCQASQSISSHLNWYQQKPGKAPKLLIYKASTLAS
GVPSRFSGSGSGTEFTLTISSLQPDDFATYYCQQGYSWGNVDNVFGGGTKVEIK
>SEQ ID 23 SI-49E12 chain B nt
GACGTCGTGATGACCCAGTCTCCTTCCACCCTGTCTGCATCTGTAGGAGACAGAGTCACCATCAATTGCCAAGCCAG
TGAGAGCATTAGCAGTTGGTTAGCCTGGTATCAGCAGAAACCAGGGAAAGCCCCTAAGCTCCTGATCTATGAAGCAT
CCAAACTGGCATCTGGGGTCCCATCAAGGTTCAGCGGCAGTGGATCTGGGACAGAATTCACTCTCACCATCAGCAGC
CTGCAGCCTGATGATTTTGCAACTTATTACTGCCAAGGCTATTTTTATTTTATTAGTCGTACTTATGTAAATTCTTT
CGGCGGAGGGACCAAGGTGGAGATCAAACGTACGGTGGCTGCACCATCTGTCTTCATCTTCCCGCCATCTGATGAGC
AGTTGAAATCTGGAACTGCCTCTGTTGTGTGCCTGCTGAATAACTTCTATCCCAGAGAGGCCAAAGTACAGTGGAAG
GTGGATAACGCCCTCCAATCGGGTAACTCCCAGGAGAGTGTCACAGAGCAGGACAGCAAGGACAGCACCTACAGCCT
CAGCAGCACCCTGACGCTGAGCAAAGCAGACTACGAGAAACACAAAGTCTACGCCTGCGAAGTCACCCATCAGGGCC
TGAGCTCGCCCGTCACAAAGAGCTTCAACAGGGGAGAGTGT
>SEQ ID 24 SI-49E12 chain B aa
DVVMTQSPSTLSASVGDRVTINCQASESISSWLAWYQQKPGKAPKLLIYEASKLASGVPSRFSGSGSGTEFTLTISS
LQPDDFATYYCQGYFYFISRTYVNSFGGGTKVEIKRTVAAPSVFIFPPSDEQLKSGTASVVCLLNNFYPREAKVQWK
VDNALQSGNSQESVTEQDSKDSTYSLSSTLTLSKADYEKHKVYACEVTHQGLSSPVTKSFNRGEC
>SEQ ID 25 SI-49E13 chain A nt
CGAGAGGGCCCCGAGCTGTCTCCTGATGACCCAGCAGGCCTCTTGGACTTGCGGCAGGGTATGTTCGCTCAACTTGT
GGCTCAGAATGTTCTGCTCATTGATGGACCACTCTCTTGGTATAGTGACCCCGGTCTGGCCGGGGTGAGTCTGACCG
GCGGGCTCTCTTATAAAGAGGATACTAAGGAACTGGTCGTAGCAAAAGCGGGCGTTTATTACGTTTTTTTTCAGCTG
GAGCTCAGGCGCGTGGTGGCCGGCGAGGGCAGTGGCTCTGTGTCCCTGGCCCTGCACTTACAGCCCTTGAGAAGCGC
TGCAGGTGCTGCCGCACTGGCTTTAACTGTTGACCTCCCTCCGGCCTCTTCTGAAGCTAGAAACAGCGCTTTCGGCT
TCCAAGGGCGCCTGCTGCACCTGAGCGCAGGCCAGCGCTTAGGTGTGCACCTTCATACAGAGGCCAGGGCCCGACAC
GCTTGGCAGCTCACACAGGGTGCCACGGTTCTCGGACTTTTCCGCGTTACTCCCGAGATCCCCGCTGGCCTCGGAAG
TACTGGTTCTGGGTCTAAACCCGGTTCCGGCGAAGGTAGTACTAAAGGACGAGAAGGGCCAGAGTTAAGTCCAGATG
ACCCTGCTGGGCTTTTGGACCTGCGGCAGGGCATGTTCGCTCAACTGGTGGCTCAGAACGTGCTGCTGATCGATGGC
CCCCTGAGTTGGTACAGCGATCCCGGGCTGGCAGGCGTGTCACTTACAGGGGGCCTCTCTTACAAGGAAGACACCAA
GGAGTTAGTGGTCGCTAAGGCTGGCGTGTATTACGTGTTCTTCCAACTGGAGCTGAGAAGGGTTGTGGCAGGAGAGG
GTAGCGGCAGCGTGTCTTTAGCCCTTCACTTGCAGCCCCTGAGGTCTGCTGCAGGTGCAGCCGCTCTCGCGCTCACC
GTGGATCTCCCCCCAGCCTCATCTGAAGCTAGGAACAGTGCATTTGGCTTTCAGGGACGCTTGCTGCACCTCTCCGC
TGGACAGAGGCTGGGCGTGCACCTTCACACAGAGGCCCGTGCCAGGCATGCATGGCAGCTCACTCAGGGGGCAACAG
TGCTGGGTCTCTTCCGCGTGACTCCTGAAATACCAGCTGGACTTGGCGGTGGAGGCAGCGGCGGAGGAGGATCTCGT
GAGGGGCCAGAACTGTCCCCCGATGACCCAGCCGGACTGCTCGATCTCAGACAGGGCATGTTCGCTCAGCTTGTAGC
CCAAAATGTCCTCCTGATTGACGGCCCTTTGAGCTGGTATAGTGATCCCGGCTTGGCCGGGGTATCTCTGACCGGAG
GCCTCTCCTACAAGGAAGACACCAAAGAGCTGGTGGTGGCAAAAGCGGGGGTGTATTATGTGTTCTTTCAGCTCGAG
CTGCGGAGAGTTGTGGCCGGGGAAGGGTCTGGGAGCGTATCTCTTGCACTTCACCTGCAGCCCCTGCGCAGCGCCGC
TGGAGCCGCCGCCCTTGCTCTTACTGTGGATCTGCCTCCTGCTTCCTCAGAAGCACGCAACAGCGCCTTCGGCTTTC
AAGGACGTCTCCTGCACTTGTCCGCAGGACAGAGGTTGGGCGTCCATTTACACACTGAGGCACGGGCACGGCACGCT
TGGCAGCTTACCCAGGGAGCCACCGTGCTGGGACTCTTTAGAGTGACACCCGAGATCCCCGCTGGCTTGTCGACAGG
CGGTGGAGGGTCCGGCGGTGGTGGATCAGAGGTGCAGCTGTTGGAGTCTGGGGGAGGCTTGGTACAGCCTGGGGGGT
CCCTGAGACTCTCCTGTGCAGCCTCTGGATTCTCCTTCAGTAGCGGGTACGACATGTGCTGGGTCCGCCAGGCTCCA
GGGAAGGGGCTGGAGTGGATCGCATGTATTGCTGCTGGTAGTGCTGGTATCACTTACGACGCGAACTGGGCGAAAGG
CCGGTTCACCATCTCCAGAGACAATTCCAAGAACACGCTGTATCTGCAAATGAACAGCCTGAGAGCCGAGGACACGG
CCGTATATTACTGTGCGAGATCGGCGTTTTCGTTCGACTACGCCATGGACCTCTGGGGCCAGGGAACCCTGGTCACC
GTCTCGAGCGCTAGCACCAAGGGCCCATCGGTCTTCCCCCTGGCACCCTCCTCCAAGAGCACCTCTGGGGGCACAGC
GGCCCTGGGCTGCCTGGTCAAGGACTACTTCCCCGAACCGGTGACGGTGTCGTGGAACTCAGGCGCCCTGACCAGCG
GCGTGCACACCTTCCCGGCTGTCCTACAGTCCTCAGGACTCTACTCCCTCAGCAGCGTGGTGACCGTGCCCTCCAGC
AGCTTGGGCACCCAGACCTACATCTGCAACGTGAATCACAAGCCCAGCAACACCAAGGTGGACAAGAGAGTTGAGCC
CAAATCTTGTGACAAAACTCACACATGCCCACCGTGCCCAGCACCTGAAGCCGCGGGGGCACCGTCAGTCTTCCTCT
TCCCCCCAAAACCCAAGGACACCCTCATGATCTCCCGGACCCCTGAGGTCACATGCGTGGTGGTGGACGTGAGCCAC
GAAGACCCTGAGGTCAAGTTCAACTGGTACGTGGACGGCGTGGAGGTGCATAATGCCAAGACAAAGCCGCGGGAGGA
GCAGTACAACAGCACGTACCGTGTGGTCAGCGTCCTCACCGTCCTGCACCAGGACTGGCTGAATGGCAAGGAGTACA
AGTGCGCGGTCTCCAACAAAGCCCTCCCAGCCCCCATCGAGAAAACCATCTCCAAAGCCAAAGGGCAGCCCCGAGAA
CCACAGGTGTACACCCTGCCCCCATCCCGGGATGAGCTGACCAAGAACCAGGTCAGCCTGACCTGCCTGGTCAAAGG
CTTCTATCCCAGCGACATCGCCGTGGAGTGGGAGAGCAATGGGCAGCCGGAGAACAACTACAAGACCACGCCTCCCG
TGCTGGACTCCGACGGCTCCTTCTTCCTCTATAGCAAGCTCACCGTGGACAAGAGCAGGTGGCAGCAGGGGAACGTC
TTCTCATGCTCCGTGATGCATGAGGCTCTGCACAACCACTACACGCAGAAGAGCCTCTCCCTGTCTCCGGGTGGCGG
TGGAGGGTCCGGCGGTGGTGGATCCGAGGTGCAGCTGGTGGAGTCTGGGGGAGGCTTGGTCCAGCCTGGGGGGTCCC
TGAGACTCTCCTGTGCAGCCTCTGGATTCACCATCAGTACCAATGCAATGAGCTGGGTCCGCCAGGCTCCAGGGAAG
GGGCTGGAGTGGATCGGAGTCATTACTGGTCGTGATATCACATACTACGCGAGCTGGGCGAAAGGCAGATTCACCAT
CTCCAGAGACAATTCCAAGAACACGCTGTATCTTCAAATGAACAGCCTGAGAGCCGAGGACACGGCTGTGTATTACT
GTGCGAGAGACGGTGGTTCTTCTGCTATTACTAGTAACAACATTTGGGGCCAGGGAACCCTGGTCACCGTCTCTTCA
GGCGGTGGCGGTAGTGGGGGAGGCGGTTCTGGCGGCGGAGGGTCCGGCGGTGGAGGATCAGACGTCGTGATGACCCA
GTCTCCTTCCACCCTGTCTGCATCTGTAGGAGACAGAGTCACCATCAATTGCCAAGCCAGTGAGAGCATTAGCAGTT
GGTTAGCCTGGTATCAGCAGAAACCAGGGAAAGCCCCTAAGCTCCTGATCTATGAAGCATCCAAACTGGCATCTGGG
GTCCCATCAAGGTTCAGCGGCAGTGGATCTGGGACAGAATTTACTCTCACCATCAGCAGCCTGCAGCCTGATGATTT
TGCAACTTATTACTGCCAAGGCTATTTTTATTTTATTAGTCGTACTTATGTAAATTCTTTCGGCGGAGGGACCAAGG
TGGAGATCAAAGGCGGTGGAGGGTCCGGCGGTGGTGGCTCCGGATTTCTTAATTCCCTTTTCAACCAAGAGGTTCAG
ATCCCCTTGACTGAAAGCTATTGCGGCCCTTGTCCGAAAAACTGGATATGTTACAAGAATAATTGTTACCAATTCTT
CGACGAAAGCAAGAACTGGTATGAGAGTCAGGCGTCTTGTATGAGTCAGAATGCCAGCCTGCTTAAGGTTTATTCAA
AAGAAGACCAGGATCTGCTTAAGTTGGTAAAGAGCTACCACTGGATGGGGCTGGTACATATCCCAACGAATGGGTCA
TGGCAGTGGGAGGACGGTTCTATTCTGAGTCCAAATCTCCTGACGATCATCGAAATGCAGAAAGGGGACTGTGCCCT
GTATGCATCATCCTTCAAGGGGTACATCGAGAACTGCAGTACCCCAAATACCTACATTTGTATGCAAAGAACGGTTG
GAGGCGGTGGCTCAGGCGGAGGCGGCTCAGGAGGTGGCGGTTCAGGAGGCGGCGGATCTTTCCTAAACTCATTATTC
AACCAAGAAGTTCAAATTCCCTTGACCGAAAGTTACTGTGGCCCATGTCCTAAAAACTGGATATGTTACAAAAATAA
CTGCTACCAATTTTTTGATGAGAGTAAAAACTGGTATGAGAGCCAGGCTTCTTGTATGTCTCAAAATGCCAGCCTTC
TGAAAGTATACAGCAAAGAGGACCAGGATTTACTTAAACTGGTGAAGTCATATCATTGGATGGGACTAGTACACATT
CCAACAAATGGATCTTGGCAGTGGGAAGATGGCTCCATTCTCTCACCCAACCTACTAACAATAATTGAAATGCAGAA
GGGAGACTGTGCACTCTATGCCTCGAGCTTTAAAGGCTATATAGAAAACTGTTCAACTCCAAATACGTACATCTGCA
TGCAAAGGACTGTG
>SEQ ID 26 SI-49E13 chain A aa
REGPELSPDDPAGLLDLRQGMFAQLVAQNVLLIDGPLSWYSDPGLAGVSLTGGLSYKEDTKELVVAKAGVYYVFFQL
ELRRVVAGEGSGSVSLALHLQPLRSAAGAAALALTVDLPPASSEARNSAFGFQGRLLHLSAGQRLGVHLHTEARARH
AWQLTQGATVLGLFRVTPEIPAGLGSTGSGSKPGSGEGSTKGREGPELSPDDPAGLLDLRQGMFAQLVAQNVLLIDG
PLSWYSDPGLAGVSLTGGLSYKEDTKELVVAKAGVYYVFFQLELRRVVAGEGSGSVSLALHLQPLRSAAGAAALALT
VDLPPASSEARNSAFGFQGRLLHLSAGQRLGVHLHTEARARHAWQLTQGATVLGLFRVTPEIPAGLGGGGSGGGGSR
EGPELSPDDPAGLLDLRQGMFAQLVAQNVLLIDGPLSWYSDPGLAGVSLTGGLSYKEDTKELVVAKAGVYYVFFQLE
LRRVVAGEGSGSVSLALHLQPLRSAAGAAALALTVDLPPASSEARNSAFGFQGRLLHLSAGQRLGVHLHTEARARHA
WQLTQGATVLGLFRVTPEIPAGLSTGGGGSGGGGSEVQLLESGGGLVQPGGSLRLSCAASGFSFSSGYDMCWVRQAP
GKGLEWIACIAAGSAGITYDANWAKGRFTISRDNSKNTLYLQMNSLRAEDTAVYYCARSAFSFDYAMDLWGQGTLVT
VSSASTKGPSVFPLAPSSKSTSGGTAALGCLVKDYFPEPVTVSWNSGALTSGVHTFPAVLQSSGLYSLSSVVTVPSS
SLGTQTYICNVNHKPSNTKVDKRVEPKSCDKTHTCPPCPAPEAAGAPSVFLFPPKPKDTLMISRTPEVTCVVVDVSH
EDPEVKFNWYVDGVEVHNAKTKPREEQYNSTYRVVSVLTVLHQDWLNGKEYKCAVSNKALPAPIEKTISKAKGQPRE
PQVYTLPPSRDELTKNQVSLTCLVKGFYPSDIAVEWESNGQPENNYKTTPPVLDSDGSFFLYSKLTVDKSRWQQGNV
FSCSVMHEALHNHYTQKSLSLSPGGGGGSGGGGSEVQLVESGGGLVQPGGSLRLSCAASGFTISTNAMSWVRQAPGK
GLEWIGVITGRDITYYASWAKGRFTISRDNSKNTLYLQMNSLRAEDTAVYYCARDGGSSAITSNNIWGQGTLVTVSS
GGGGSGGGGSGGGGSGGGGSDVVMTQSPSTLSASVGDRVTINCQASESISSWLAWYQQKPGKAPKLLIYEASKLASG
VPSRFSGSGSGTEFTLTISSLQPDDFATYYCQGYFYFISRTYVNSFGGGTKVEIKGGGGSGGGGSGFLNSLFNQEVQ
IPLTESYCGPCPKNWICYKNNCYQFFDESKNWYESQASCMSQNASLLKVYSKEDQDLLKLVKSYHWMGLVHIPTNGS
WQWEDGSILSPNLLTIIEMQKGDCALYASSFKGYIENCSTPNTYICMQRTVGGGGSGGGGSGGGGSGGGGSFLNSLF
NQEVQIPLTESYCGPCPKNWICYKNNCYQFFDESKNWYESQASCMSQNASLLKVYSKEDQDLLKLVKSYHWMGLVHI
PTNGSWQWEDGSILSPNLLTIIEMQKGDCALYASSFKGYIENCSTPNTYICMQRTV
>SEQ ID 27 SI-49E13 chain B nt
GACATCCAGATGACCCAGTCTCCTTCCACCCTGTCTGCATCTGTAGGAGACAGAGTCACCATCACTTGCCAGGCCAG
TCAGAGCATTAGTTCCCACTTAAACTGGTATCAGCAGAAACCAGGGAAAGCCCCTAAGCTCCTGATCTATAAGGCAT
CCACTCTGGCATCTGGGGTCCCATCAAGGTTCAGCGGCAGTGGATCTGGGACAGAATTTACTCTCACCATCAGCAGC
CTGCAGCCTGATGATTTTGCAACTTATTACTGCCAACAGGGTTATAGTTGGGGTAATGTTGATAATGTTTTCGGCGG
AGGGACCAAGGTGGAGATCAAACGTACGGTGGCTGCACCATCTGTCTTCATCTTCCCGCCATCTGATGAGCAGTTGA
AATCTGGAACTGCCTCTGTTGTGTGCCTGCTGAATAACTTCTATCCCAGAGAGGCCAAAGTACAGTGGAAGGTGGAT
AACGCCCTCCAATCGGGTAACTCCCAGGAGAGTGTCACAGAGCAGGACAGCAAGGACAGCACCTACAGCCTCAGCAG
CACCCTGACGCTGAGCAAAGCAGACTACGAGAAACACAAAGTCTACGCCTGCGAAGTCACCCATCAGGGCCTGAGCT
CGCCCGTCACAAAGAGCTTCAACAGGGGAGAGTGT
>SEQ ID 28 SI-49E13 chain B aa
DIQMTQSPSTLSASVGDRVTITCQASQSISSHLNWYQQKPGKAPKLLIYKASTLASGVPSRFSGSGSGTEFTLTISS
LQPDDFATYYCQQGYSWGNVDNVFGGGTKVEIKRTVAAPSVFIFPPSDEQLKSGTASVVCLLNNFYPREAKVQWKVD
NALQSGNSQESVTEQDSKDSTYSLSSTLTLSKADYEKHKVYACEVTHQGLSSPVTKSFNRGEC
>SEQ ID 29 SI-49E14 chain A nt
GACATCCAGATGACCCAGTCTCCTTCCACCCTGTCTGCATCTGTAGGAGACAGAGTCACCATCACTTGCCAGGCCAG
TCAGAGCATTAGTTCCCACTTAAACTGGTATCAGCAGAAACCAGGGAAAGCCCCTAAGCTCCTGATCTATAAGGCAT
CCACTCTGGCATCTGGGGTCCCATCAAGGTTCAGCGGCAGTGGATCTGGGACAGAATTTACTCTCACCATCAGCAGC
CTGCAGCCTGATGATTTTGCAACTTATTACTGCCAACAGGGTTATAGTTGGGGTAATGTTGATAATGTTTTCGGCGG
AGGGACCAAGGTGGAGATCAAAGGCGGTGGCGGTAGTGGGGGAGGCGGTTCTGGCGGCGGAGGGTCCGGCGGTGGAG
GATCAGAGGTGCAGCTGTTGGAGTCTGGGGGAGGCTTGGTACAGCCTGGGGGGTCCCTGAGACTCTCCTGTGCAGCC
TCTGGATTCTCCTTCAGTAGCGGGTACGACATGTGCTGGGTCCGCCAGGCTCCAGGGAAGGGGCTGGAGTGGATCGC
ATGTATTGCTGCTGGTAGTGCTGGTATCACTTACGACGCGAACTGGGCGAAAGGCCGGTTCACCATCTCCAGAGACA
ATTCCAAGAACACGCTGTATCTGCAAATGAACAGCCTGAGAGCCGAGGACACGGCCGTATATTACTGTGCGAGATCG
GCGTTTTCGTTCGACTACGCCATGGACCTCTGGGGCCAGGGAACCCTGGTCACCGTGTCGACAGGCGGTGGAGGGTC
CGGCGGTGGTGGATCACGTGAGGGGCCAGAACTGTCCCCCGATGACCCAGCCGGACTGCTCGATCTCAGACAGGGCA
TGTTCGCTCAGCTTGTAGCCCAAAATGTCCTCCTGATTGACGGCCCTTTGAGCTGGTATAGTGATCCCGGCTTGGCC
GGGGTATCTCTGACCGGAGGCCTCTCCTACAAGGAAGACACCAAAGAGCTGGTGGTGGCAAAAGCGGGGGTGTATTA
TGTGTTCTTTCAGCTCGAGCTGCGGAGAGTTGTGGCCGGGGAAGGGTCTGGGAGCGTATCTCTTGCACTTCACCTGC
AGCCCCTGCGCAGCGCCGCTGGAGCCGCCGCCCTTGCTCTTACTGTGGATCTGCCTCCTGCTTCCTCAGAAGCACGC
AACAGCGCCTTCGGCTTTCAAGGACGTCTCCTGCACTTGTCCGCAGGACAGAGGTTGGGCGTCCATTTACACACTGA
GGCACGGGCACGGCACGCTTGGCAGCTTACCCAGGGAGCCACCGTGCTGGGACTCTTTAGAGTGACACCCGAGATCC
CCGCTGGCTTGGCTAGCACCAAGGGCCCATCGGTCTTCCCCCTGGCACCCTCCTCCAAGAGCACCTCTGGGGGCACA
GCGGCCCTGGGCTGCCTGGTCAAGGACTACTTCCCCGAACCGGTGACGGTGTCGTGGAACTCAGGCGCCCTGACCAG
CGGCGTGCACACCTTCCCGGCTGTCCTACAGTCCTCAGGACTCTACTCCCTCAGCAGCGTGGTGACCGTGCCCTCCA
GCAGCTTGGGCACCCAGACCTACATCTGCAACGTGAATCACAAGCCCAGCAACACCAAGGTGGACAAGAGAGTTGAG
CCCAAATCTTGTGACAAAACTCACACATGCCCACCGTGCCCAGCACCTGAAGCCGCGGGGGCACCGTCAGTCTTCCT
CTTCCCCCCAAAACCCAAGGACACCCTCATGATCTCCCGGACCCCTGAGGTCACATGCGTGGTGGTGGACGTGAGCC
ACGAAGACCCTGAGGTCAAGTTCAACTGGTACGTGGACGGCGTGGAGGTGCATAATGCCAAGACAAAGCCGCGGGAG
GAGCAGTACAACAGCACGTACCGTGTGGTCAGCGTCCTCACCGTCCTGCACCAGGACTGGCTGAATGGCAAGGAGTA
CAAGTGCGCGGTCTCCAACAAAGCCCTCCCAGCCCCCATCGAGAAAACCATCTCCAAAGCCAAAGGGCAGCCCCGAG
AACCACAGGTGTACACCCTGCCCCCATCCCGGGATGAGCTGACCAAGAACCAGGTCAGCCTGACCTGCCTGGTCAAA
GGCTTCTATCCCAGCGACATCGCCGTGGAGTGGGAGAGCAATGGGCAGCCGGAGAACAACTACAAGACCACGCCTCC
CGTGCTGGACTCCGACGGCTCCTTCTTCCTCTATAGCAAGCTCACCGTGGACAAGAGCAGGTGGCAGCAGGGGAACG
TCTTCTCATGCTCCGTGATGCATGAGGCTCTGCACAACCACTACACGCAGAAGAGCCTCTCCCTGTCTCCGGGTGGC
GGTGGAGGGTCCGGCGGTGGTGGATCCGAGGTGCAGCTGGTGGAGTCTGGGGGAGGCTTGGTCCAGCCTGGGGGGTC
CCTGAGACTCTCCTGTGCAGCCTCTGGATTCACCATCAGTACCAATGCAATGAGCTGGGTCCGCCAGGCTCCAGGGA
AGGGGCTGGAGTGGATCGGAGTCATTACTGGTCGTGATATCACATACTACGCGAGCTGGGCGAAAGGCAGATTCACC
ATCTCCAGAGACAATTCCAAGAACACGCTGTATCTTCAAATGAACAGCCTGAGAGCCGAGGACACGGCTGTGTATTA
CTGTGCGAGAGACGGTGGTTCTTCTGCTATTACTAGTAACAACATTTGGGGCCAGGGAACCCTGGTCACCGTCTCTT
CAGGCGGTGGCGGTAGTGGGGGAGGCGGTTCTGGCGGCGGAGGGTCCGGCGGTGGAGGATCAGACGTCGTGATGACC
CAGTCTCCTTCCACCCTGTCTGCATCTGTAGGAGACAGAGTCACCATCAATTGCCAAGCCAGTGAGAGCATTAGCAG
TTGGTTAGCCTGGTATCAGCAGAAACCAGGGAAAGCCCCTAAGCTCCTGATCTATGAAGCATCCAAACTGGCATCTG
GGGTCCCATCAAGGTTCAGCGGCAGTGGATCTGGGACAGAATTTACTCTCACCATCAGCAGCCTGCAGCCTGATGAT
TTTGCAACTTATTACTGCCAAGGCTATTTTTATTTTATTAGTCGTACTTATGTAAATTCTTTCGGCGGAGGGACCAA
GGTGGAGATCAAAGGCGGTGGAGGGTCCGGCGGTGGTGGCTCCGGATTTCTTAATTCCCTTTTCAACCAAGAGGTTC
AGATCCCCTTGACTGAAAGCTATTGCGGCCCTTGTCCGAAAAACTGGATATGTTACAAGAATAATTGTTACCAATTC
TTCGACGAAAGCAAGAACTGGTATGAGAGTCAGGCGTCTTGTATGAGTCAGAATGCCAGCCTGCTTAAGGTTTATTC
AAAAGAAGACCAGGATCTGCTTAAGTTGGTAAAGAGCTACCACTGGATGGGGCTGGTACATATCCCAACGAATGGGT
CATGGCAGTGGGAGGACGGTTCTATTCTGAGTCCAAATCTCCTGACGATCATCGAAATGCAGAAAGGGGACTGTGCC
CTGTATGCATCATCCTTCAAGGGGTACATCGAGAACTGCAGTACCCCAAATACCTACATTTGTATGCAAAGAACGGT
TGGAGGCGGTGGCTCAGGCGGAGGCGGCTCAGGAGGTGGCGGTTCAGGAGGCGGCGGATCTTTCCTAAACTCATTAT
TCAACCAAGAAGTTCAAATTCCCTTGACCGAAAGTTACTGTGGCCCATGTCCTAAAAACTGGATATGTTACAAAAAT
AACTGCTACCAATTTTTTGATGAGAGTAAAAACTGGTATGAGAGCCAGGCTTCTTGTATGTCTCAAAATGCCAGCCT
TCTGAAAGTATACAGCAAAGAGGACCAGGATTTACTTAAACTGGTGAAGTCATATCATTGGATGGGACTAGTACACA
TTCCAACAAATGGATCTTGGCAGTGGGAAGATGGCTCCATTCTCTCACCCAACCTACTAACAATAATTGAAATGCAG
AAGGGAGACTGTGCACTCTATGCCTCGAGCTTTAAAGGCTATATAGAAAACTGTTCAACTCCAAATACGTACATCTG
CATGCAAAGGACTGTG
>SEQ ID 30 SI-49E14 chain A aa
DIQMTQSPSTLSASVGDRVTITCQASQSISSHLNWYQQKPGKAPKLLIYKASTLASGVPSRFSGSGSGTEFTLTISS
LQPDDFATYYCQQGYSWGNVDNVFGGGTKVEIKGGGGSGGGGSGGGGSGGGGSEVQLLESGGGLVQPGGSLRLSCAA
SGFSFSSGYDMCWVRQAPGKGLEWIACIAAGSAGITYDANWAKGRFTISRDNSKNTLYLQMNSLRAEDTAVYYCARS
AFSFDYAMDLWGQGTLVTVSTGGGGSGGGGSREGPELSPDDPAGLLDLRQGMFAQLVAQNVLLIDGPLSWYSDPGLA
GVSLTGGLSYKEDTKELVVAKAGVYYVFFQLELRRVVAGEGSGSVSLALHLQPLRSAAGAAALALTVDLPPASSEAR
NSAFGFQGRLLHLSAGQRLGVHLHTEARARHAWQLTQGATVLGLFRVTPEIPAGLASTKGPSVFPLAPSSKSTSGGT
AALGCLVKDYFPEPVTVSWNSGALTSGVHTFPAVLQSSGLYSLSSVVTVPSSSLGTQTYICNVNHKPSNTKVDKRVE
PKSCDKTHTCPPCPAPEAAGAPSVFLFPPKPKDTLMISRTPEVTCVVVDVSHEDPEVKFNWYVDGVEVHNAKTKPRE
EQYNSTYRVVSVLTVLHQDWLNGKEYKCAVSNKALPAPIEKTISKAKGQPREPQVYTLPPSRDELTKNQVSLTCLVK
GFYPSDIAVEWESNGQPENNYKTTPPVLDSDGSFFLYSKLTVDKSRWQQGNVFSCSVMHEALHNHYTQKSLSLSPGG
GGGSGGGGSEVQLVESGGGLVQPGGSLRLSCAASGFTISTNAMSWVRQAPGKGLEWIGVITGRDITYYASWAKGRFT
ISRDNSKNTLYLQMNSLRAEDTAVYYCARDGGSSAITSNNIWGQGTLVTVSSGGGGSGGGGSGGGGSGGGGSDVVMT
QSPSTLSASVGDRVTINCQASESISSWLAWYQQKPGKAPKLLIYEASKLASGVPSRFSGSGSGTEFTLTISSLQPDD
FATYYCQGYFYFISRTYVNSFGGGTKVEIKGGGGSGGGGSGFLNSLFNQEVQIPLTESYCGPCPKNWICYKNNCYQF
FDESKNWYESQASCMSQNASLLKVYSKEDQDLLKLVKSYHWMGLVHIPTNGSWQWEDGSILSPNLLTIIEMQKGDCA
LYASSFKGYIENCSTPNTYICMQRTVGGGGSGGGGSGGGGSGGGGSFLNSLFNQEVQIPLTESYCGPCPKNWICYKN
NCYQFFDESKNWYESQASCMSQNASLLKVYSKEDQDLLKLVKSYHWMGLVHIPTNGSWQWEDGSILSPNLLTIIEMQ
KGDCALYASSFKGYIENCSTPNTYICMQRTV
>SEQ ID 31 SI-49E14 chain B nt
CGAGAGGGCCCCGAGCTGTCTCCTGATGACCCAGCAGGCCTCTTGGACTTGCGGCAGGGTATGTTCGCTCAACTTGT
GGCTCAGAATGTTCTGCTCATTGATGGACCACTCTCTTGGTATAGTGACCCCGGTCTGGCCGGGGTGAGTCTGACCG
GCGGGCTCTCTTATAAAGAGGATACTAAGGAACTGGTCGTAGCAAAAGCGGGCGTTTATTACGTTTTTTTTCAGCTG
GAGCTCAGGCGCGTGGTGGCCGGCGAGGGCAGTGGCTCTGTGTCCCTGGCCCTGCACTTACAGCCCTTGAGAAGCGC
TGCAGGTGCTGCCGCACTGGCTTTAACTGTTGACCTCCCTCCGGCCTCTTCTGAAGCTAGAAACAGCGCTTTCGGCT
TCCAAGGGCGCCTGCTGCACCTGAGCGCAGGCCAGCGCTTAGGTGTGCACCTTCATACAGAGGCCAGGGCCCGACAC
GCTTGGCAGCTCACACAGGGTGCCACGGTTCTCGGACTTTTCCGCGTTACTCCCGAGATCCCCGCTGGCCTCGGAAG
TACTGGTTCTGGGTCTAAACCCGGTTCCGGCGAAGGTAGTACTAAAGGACGAGAAGGGCCAGAGTTAAGTCCAGATG
ACCCTGCTGGGCTTTTGGACCTGCGGCAGGGCATGTTCGCTCAACTGGTGGCTCAGAACGTGCTGCTGATCGATGGC
CCCCTGAGTTGGTACAGCGATCCCGGGCTGGCAGGCGTGTCACTTACAGGGGGCCTCTCTTACAAGGAAGACACCAA
GGAGTTAGTGGTCGCTAAGGCTGGCGTGTATTACGTGTTCTTCCAACTGGAGCTGAGAAGGGTTGTGGCAGGAGAGG
GTAGCGGCAGCGTGTCTTTAGCCCTTCACTTGCAGCCCCTGAGGTCTGCTGCAGGTGCAGCCGCTCTCGCGCTCACC
GTGGATCTCCCCCCAGCCTCATCTGAAGCTAGGAACAGTGCATTTGGCTTTCAGGGACGCTTGCTGCACCTCTCCGC
TGGACAGAGGCTGGGCGTGCACCTTCACACAGAGGCCCGTGCCAGGCATGCATGGCAGCTCACTCAGGGGGCAACAG
TGCTGGGTCTCTTCCGCGTGACTCCTGAAATACCAGCTGGACTTCGTACGGTGGCTGCACCATCTGTCTTCATCTTC
CCGCCATCTGATGAGCAGTTGAAATCTGGAACTGCCTCTGTTGTGTGCCTGCTGAATAACTTCTATCCCAGAGAGGC
CAAAGTACAGTGGAAGGTGGATAACGCCCTCCAATCGGGTAACTCCCAGGAGAGTGTCACAGAGCAGGACAGCAAGG
ACAGCACCTACAGCCTCAGCAGCACCCTGACGCTGAGCAAAGCAGACTACGAGAAACACAAAGTCTACGCCTGCGAA
GTCACCCATCAGGGCCTGAGCTCGCCCGTCACAAAGAGCTTCAACAGGGGAGAGTGT
>SEQ ID 32 SI-49E14 chain B aa
REGPELSPDDPAGLLDLRQGMFAQLVAQNVLLIDGPLSWYSDPGLAGVSLTGGLSYKEDTKELVVAKAGVYYVFFQL
ELRRVVAGEGSGSVSLALHLQPLRSAAGAAALALTVDLPPASSEARNSAFGFQGRLLHLSAGQRLGVHLHTEARARH
AWQLTQGATVLGLFRVTPEIPAGLGSTGSGSKPGSGEGSTKGREGPELSPDDPAGLLDLRQGMFAQLVAQNVLLIDG
PLSWYSDPGLAGVSLTGGLSYKEDTKELVVAKAGVYYVFFQLELRRVVAGEGSGSVSLALHLQPLRSAAGAAALALT
VDLPPASSEARNSAFGFQGRLLHLSAGQRLGVHLHTEARARHAWQLTQGATVLGLFRVTPEIPAGLRTVAAPSVFIF
PPSDEQLKSGTASVVCLLNNFYPREAKVQWKVDNALQSGNSQESVTEQDSKDSTYSLSSTLTLSKADYEKHKVYACE
VTHQGLSSPVTKSFNRGEC
>SEQ ID 33 SI-1P1 chain A nt
GACGTCGTGATGACCCAGTCTCCTTCCACCCTGTCTGCATCTGTAGGAGACAGAGTCACCATCAATTGCCAAGCCAG
TGAGAGCATTAGCAGTTGGTTAGCCTGGTATCAGCAGAAACCAGGGAAAGCCCCTAAGCTCCTGATCTATGAAGCAT
CCAAACTGGCATCTGGGGTCCCATCAAGGTTCAGCGGCAGTGGATCTGGGACAGAATTTACTCTCACCATCAGCAGC
CTGCAGCCTGATGATTTTGCAACTTATTACTGCCAAGGCTATTTTTATTTTATTAGTCGTACTTATGTAAATTCTTT
CGGCGGAGGGACCAAGGTGGAGATCAAAGGCGGTGGCGGTAGTGGGGGAGGCGGTTCTGGCGGCGGAGGGTCCGGCG
GTGGAGGATCAGAGGTGCAGCTGGTGGAGTCTGGGGGAGGCTTGGTCCAGCCTGGGGGGTCCCTGAGACTCTCCTGT
GCAGCCTCTGGATTCACCATCAGTACCAATGCAATGAGCTGGGTCCGCCAGGCTCCAGGGAAGGGGCTGGAGTGGAT
CGGAGTCATTACTGGTCGTGATATCACATACTACGCGAGCTGGGCGAAAGGCAGATTCACCATCTCCAGAGACAATT
CCAAGAACACGCTGTATCTTCAAATGAACAGCCTGAGAGCCGAGGACACGGCTGTGTATTACTGTGCGAGAGACGGT
GGTTCTTCTGCTATTACTAGTAACAACATTTGGGGCCAGGGAACCCTGGTCACCGTGTCGACAGGCGGTGGAGGGTC
CGGCGGTGGTGGATCACAGGTGCAGCTGAAGCAGTCAGGACCTGGCCTAGTGCAGCCCTCACAGAGCCTGTCCATCA
CCTGCACAGTCTCTGGTTTCTCATTAACTAACTATGGTGTACACTGGGTTCGCCAGTCTCCAGGAAAGGGTCTGGAG
TGGCTGGGAGTGATATGGAGTGGTGGAAACACAGACTATAATACACCTTTCACATCCAGACTGAGCATCAACAAGGA
CAATTCCAAGAGCCAAGTTTTCTTTAAAATGAACAGTCTGCAATCTAATGACACAGCCATATATTACTGTGCCAGAG
CCCTCACCTACTATGATTACGAGTTTGCTTACTGGGGCCAAGGGACTCTGGTCACTGTCTCTAGCGCTAGCACCAAG
GGCCCATCGGTCTTCCCCCTGGCACCCTCCTCCAAGAGCACCTCTGGGGGCACAGCGGCCCTGGGCTGCCTGGTCAA
GGACTACTTCCCCGAACCGGTGACGGTGTCGTGGAACTCAGGCGCCCTGACCAGCGGCGTGCACACCTTCCCGGCTG
TCCTACAGTCCTCAGGACTCTACTCCCTCAGCAGCGTGGTGACCGTGCCCTCCAGCAGCTTGGGCACCCAGACCTAC
ATCTGCAACGTGAATCACAAGCCCAGCAACACCAAGGTGGACAAGAGAGTTGAGCCCAAATCTTGTGACAAAACTCA
CACATGCCCACCGTGCCCAGCACCTGAAGCCGCGGGGGCACCGTCAGTCTTCCTCTTCCCCCCAAAACCCAAGGACA
CCCTCATGATCTCCCGGACCCCTGAGGTCACATGCGTGGTGGTGGACGTGAGCCACGAAGACCCTGAGGTCAAGTTC
AACTGGTACGTGGACGGCGTGGAGGTGCATAATGCCAAGACAAAGCCGCGGGAGGAGCAGTACAACAGCACGTACCG
TGTGGTCAGCGTCCTCACCGTCCTGCACCAGGACTGGCTGAATGGCAAGGAGTACAAGTGCGCGGTCTCCAACAAAG
CCCTCCCAGCCCCCATCGAGAAAACCATCTCCAAAGCCAAAGGGCAGCCCCGAGAACCACAGGTGTACACCCTGCCC
CCATCCCGGGATGAGCTGACCAAGAACCAGGTCAGCCTGACCTGCCTGGTCAAAGGCTTCTATCCCAGCGACATCGC
CGTGGAGTGGGAGAGCAATGGGCAGCCGGAGAACAACTACAAGACCACGCCTCCCGTGCTGGACTCCGACGGCTCCT
TCTTCCTCTATAGCAAGCTCACCGTGGACAAGAGCAGGTGGCAGCAGGGGAACGTCTTCTCATGCTCCGTGATGCAT
GAGGCTCTGCACAACCACTACACGCAGAAGAGCCTCTCCCTGTCTCCGGGTGGCGGTGGAGGGTCCGGCGGTGGTGG
ATCCGAGGTGCAGCTGTTGGAGTCTGGGGGAGGCTTGGTACAGCCTGGGGGGTCCCTGAGACTCTCCTGTGCAGCCT
CTGGATTCTCCTTCAGTAGCGGGTACGACATGTGCTGGGTCCGCCAGGCTCCAGGGAAGGGGCTGGAGTGGATCGCA
TGCATTGCTGCTGGTAGTGCTGGTATCACTTACGACGCGAACTGGGCGAAAGGCCGGTTCACCATCTCCAGAGACAA
TTCCAAGAACACGCTGTATCTGCAAATGAACAGCCTGAGAGCCGAGGACACGGCCGTATATTACTGTGCGAGATCGG
CGTTTTCGTTCGACTACGCCATGGACCTCTGGGGCCAGGGAACCCTGGTCACCGTCTCGAGCGGTGGAGGCGGATCT
GGCGGAGGTGGTTCCGGCGGTGGCGGCTCCGGTGGAGGCGGCTCTGACATCCAGATGACCCAGTCTCCTTCCACCCT
GTCTGCATCTGTAGGAGACAGAGTCACCATCACTTGCCAGGCCAGTCAGAGCATTAGTTCCCACTTAAACTGGTATC
AGCAGAAACCAGGGAAAGCCCCTAAGCTCCTGATCTATAAGGCATCCACTCTGGCATCTGGGGTCCCATCAAGGTTC
AGCGGCAGTGGATCTGGGACAGAATTTACTCTCACCATCAGCAGCCTGCAGCCTGATGATTTTGCAACTTATTACTG
CCAACAGGGTTATAGTTGGGGTAATGTTGATAATGTTTTCGGCGGAGGGACCAAGGTGGAGATCAAAGGCGGTGGAG
GGTCCGGCGGTGGTGGCTCCGGACGGTCGCTGGTGGAGTCTGGGGGAGGCTTGGTCCAGCCTGGGGGGTCCCTGAGA
CTCTCCTGTACTGCCTCTGGATTCACCATCAGTAGCTACCACATGCAGTGGGTCCGCCAGGCTCCAGGGAAGGGGCT
GGAGTACATCGGAACCATTAGTAGTGGTGGTAATGTATACTACGCAAGCTCCGCTAGAGGCAGATTCACCATCTCCA
GACCCTCGTCCAAGAACACGGTGGATCTTCAAATGAACAGCCTGAGAGCCGAGGACACGGCTGTGTATTACTGTGCG
AGAGACTCTGGTTATAGTGATCCTATGTGGGGCCAGGGAACCCTGGTCACCGTCTCTTCAGGCGGTGGCGGTAGTGG
GGGAGGCGGTTCTGGCGGCGGAGGGTCCGGCGGTGGAGGATCAGACGTTGTGATGACCCAGTCTCCATCTTCCGTGT
CTGCATCTGTAGGAGACAGAGTCACCATCACCTGTCAGGCCAGTCAGAACATTAGGACTTACTTATCCTGGTATCAG
CAGAAACCAGGGAAAGCCCCTAAGCTCCTGATCTATGCTGCAGCCAATCTGGCATCTGGGGTCCCATCAAGGTTCAG
CGGCAGTGGATCTGGGACAGATTTCACTCTCACCATCAGCGACCTGGAGCCTGGCGATGCTGCAACTTACTATTGTC
AGTCTACCTATCTTGGTACTGATTATGTTGGCGGTGCTTTCGGCGGAGGGACCAAGGTGGAGATCAAA
>SEQ ID 34 SI-1P1 chain A aa
DVVMTQSPSTLSASVGDRVTINCQASESISSWLAWYQQKPGKAPKLLIYEASKLASGVPSRFSGSGSGTEFTLTISS
LQPDDFATYYCQGYFYFISRTYVNSFGGGTKVEIKGGGGSGGGGSGGGGSGGGGSEVQLVESGGGLVQPGGSLRLSC
AASGFTISTNAMSWVRQAPGKGLEWIGVITGRDITYYASWAKGRFTISRDNSKNTLYLQMNSLRAEDTAVYYCARDG
GSSAITSNNIWGQGTLVTVSTGGGGSGGGGSQVQLKQSGPGLVQPSQSLSITCTVSGFSLTNYGVHWVRQSPGKGLE
WLGVIWSGGNTDYNTPFTSRLSINKDNSKSQVFFKMNSLQSNDTAIYYCARALTYYDYEFAYWGQGTLVTVSSASTK
GPSVFPLAPSSKSTSGGTAALGCLVKDYFPEPVTVSWNSGALTSGVHTFPAVLOSSGLYSLSSVVTVPSSSLGTQTY
ICNVNHKPSNTKVDKRVEPKSCDKTHTCPPCPAPEAAGAPSVFLFPPKPKDTLMISRTPEVTCVVVDVSHEDPEVKE
NWYVDGVEVHNAKTKPREEQYNSTYRVVSVLTVLHQDWLNGKEYKCAVSNKALPAPIEKTISKAKGQPREPQVYTLP
PSRDELTKNQVSLTCLVKGFYPSDIAVEWESNGQPENNYKTTPPVLDSDGSFFLYSKLTVDKSRWQQGNVFSCSVMH
EALHNHYTQKSLSLSPGGGGGSGGGGSEVQLLESGGGLVQPGGSLRLSCAASGFSFSSGYDMCWVRQAPGKGLEWIA
CIAAGSAGITYDANWAKGRFTISRDNSKNTLYLQMNSLRAEDTAVYYCARSAFSFDYAMDLWGQGTLVTVSSGGGGS
GGGGSGGGGSGGGGSDIQMTQSPSTLSASVGDRVTITCQASQSISSHLNWYQQKPGKAPKLLIYKASTLASGVPSRF
SGSGSGTEFTLTISSLQPDDFATYYCQQGYSWGNVDNVFGGGTKVEIKGGGGSGGGGSGRSLVESGGGLVQPGGSLR
LSCTASGFTISSYHMQWVRQAPGKGLEYIGTISSGGNVYYASSARGRFTISRPSSKNTVDLQMNSLRAEDTAVYYCA
RDSGYSDPMWGQGTLVTVSSGGGGSGGGGSGGGGSGGGGSDVVMTQSPSSVSASVGDRVTITCQASQNIRTYLSWYQ
QKPGKAPKLLIYAAANLASGVPSRFSGSGSGTDFTLTISDLEPGDAATYYCQSTYLGTDYVGGAFGGGTKVEIK
>SEQ ID 35 SI-1P1 chain B nt
GACATCTTGCTGACTCAGTCTCCAGTCATCCTGTCTGTGAGTCCAGGAGAAAGAGTCAGTTTCTCCTGCAGGGCCAG
TCAGAGTATTGGCACAAACATACACTGGTATCAGCAAAGAACAAATGGTTCTCCAAGGCTTCTCATAAAGTATGCTT
CTGAGTCTATCTCTGGGATTCCTTCCAGGTTTAGTGGCAGTGGATCAGGGACAGATTTTACTCTTAGCATCAACAGT
GTGGAGTCTGAAGATATTGCAGATTATTACTGTCAACAAAATAATAACTGGCCAACCACGTTCGGTGCTGGGACCAA
GCTGGAGCTGAAACGTACGGTGGCTGCACCATCTGTCTTCATCTTCCCGCCATCTGATGAGCAGTTGAAATCTGGAA
CTGCCTCTGTTGTGTGCCTGCTGAATAACTTCTATCCCAGAGAGGCCAAAGTACAGTGGAAGGTGGATAACGCCCTC
CAATCGGGTAACTCCCAGGAGAGTGTCACAGAGCAGGACAGCAAGGACAGCACCTACAGCCTCAGCAGCACCCTGAC
GCTGAGCAAAGCAGACTACGAGAAACACAAAGTCTACGCCTGCGAAGTCACCCATCAGGGCCTGAGCTCGCCCGTCA
CAAAGAGCTTCAACAGGGGAGAGTGTGGCGGTGGAGGGTCCGGCGGTGGTGGATCCCAGTCTGCCCTGACTCAGCCT
GCCTCCGTGTCTGGGTCTCCTGGACAGTCGATCACCATCTCCTGCACTGGAACCAGCAGTGACGTTGGTGGTTATAA
CTTTGTCTCCTGGTACCAACAACACCCAGGCAAAGCCCCCAAACTCATGATCTATGATGTCAGTGATCGGCCCTCAG
GGGTGTCTGATCGCTTCTCCGGCTCCAAGTCTGGCAACACGGCCTCCCTGATCATCTCTGGCCTCCAGGCTGACGAC
GAGGCTGATTATTACTGCAGCTCATATGGGAGCAGCAGCACTCATGTGATTTTCGGCGGAGGGACCAAGGTGACCGT
CCTAGGTGGAGGCGGTTCAGGCGGAGGTGGTTCCGGCGGTGGCGGCTCCGGTGGAGGCGGCTCTCAGGTGCAATTGC
AGGAGTCGGGGGGAGGCCTGGTCAAGCCTGGAGGGTCCCTGAGACTCTCCTGTGCAGCCTCTGGATTCACCTTTAGT
AGTTATTGGATGAGCTGGGTCCGCCAGGCTCCAGGGAAGGGGCTGGAGTGGGTGGCCAACATAAACCGCGATGGAAG
TGCGAGTTACTATGTGGACTCTGTGAAGGGCCGATTCACCATCTCCAGAGACGACGCCAAGAACTCACTGTATCTGC
AAATGAACAGCCTGAGAGCTGAGGACACGGCTGTGTATTACTGTGCGAGAGATCGTGGGGTGGGCTACTTCGATCTC
TGGGGCCGTGGCACCCTGGTCACCGTCTCGAGC
>SEQ ID 36 SI-1P1 chain B aa
DILLTQSPVILSVSPGERVSFSCRASQSIGTNIHWYQQRTNGSPRLLIKYASESISGIPSRFSGSGSGTDFTLSINS
VESEDIADYYCQQNNNWPTTFGAGTKLELKRTVAAPSVFIFPPSDEQLKSGTASVVCLLNNFYPREAKVQWKVDNAL
QSGNSQESVTEQDSKDSTYSLSSTLTLSKADYEKHKVYACEVTHQGLSSPVTKSFNRGECGGGGSGGGGSQSALTQP
ASVSGSPGQSITISCTGTSSDVGGYNFVSWYQQHPGKAPKLMIYDVSDRPSGVSDRFSGSKSGNTASLIISGLQADD
EADYYCSSYGSSSTHVIFGGGTKVTVLGGGGSGGGGSGGGGSGGGGSQVQLQESGGGLVKPGGSLRLSCAASGFTFS
SYWMSWVRQAPGKGLEWVANINRDGSASYYVDSVKGRFTISRDDAKNSLYLQMNSLRAEDTAVYYCARDRGVGYFDL
WGRGTLVTVSS
>SEQ ID 37 SI-1P2 chain A nt
GACGTCGTGATGACCCAGTCTCCTTCCACCCTGTCTGCATCTGTAGGAGACAGAGTCACCATCAATTGCCAAGCCAG
TGAGAGCATTAGCAGTTGGTTAGCCTGGTATCAGCAGAAACCAGGGAAAGCCCCTAAGCTCCTGATCTATGAAGCAT
CCAAACTGGCATCTGGGGTCCCATCAAGGTTCAGCGGCAGTGGATCTGGGACAGAATTTACTCTCACCATCAGCAGC
CTGCAGCCTGATGATTTTGCAACTTATTACTGCCAAGGCTATTTTTATTTTATTAGTCGTACTTATGTAAATTCTTT
CGGCTGTGGGACCAAGGTGGAGATCAAAGGTGGAGGCGGTTCAGGCGGAGGTGGAAGTGGTGGTGGCGGCTCTGGAG
GCGGCGGATCTGAGGTGCAGCTGGTGGAGTCTGGGGGAGGCTTGGTCCAGCCTGGGGGGTCCCTGAGACTCTCCTGT
GCAGCCTCTGGATTCACCATCAGTACCAATGCAATGAGCTGGGTCCGCCAGGCTCCAGGGAAGTGCCTGGAGTGGAT
CGGAGTCATTACTGGTCGTGATATCACATACTACGCGAGCTGGGCGAAAGGCAGATTCACCATCTCCAGAGACAATT
CCAAGAACACGCTGTATCTTCAAATGAACAGCCTGAGAGCCGAGGACACGGCTGTGTATTACTGTGCGAGAGACGGT
GGTTCTTCTGCTATTACTAGTAACAACATTTGGGGCCAGGGAACCCTGGTCACCGTGTCGACAGGCGGTGGAGGGTC
CGGCGGTGGTGGATCACAGGTGCAGCTGAAGCAGTCAGGACCTGGCCTAGTGCAGCCCTCACAGAGCCTGTCCATCA
CCTGCACAGTCTCTGGTTTCTCATTAACTAACTATGGTGTACACTGGGTTCGCCAGTCTCCAGGAAAGGGTCTGGAG
TGGCTGGGAGTGATATGGAGTGGTGGAAACACAGACTATAATACACCTTTCACATCCAGACTGAGCATCAACAAGGA
CAATTCCAAGAGCCAAGTTTTCTTTAAAATGAACAGTCTGCAATCTAATGACACAGCCATATATTACTGTGCCAGAG
CCCTCACCTACTATGATTACGAGTTTGCTTACTGGGGCCAAGGGACTCTGGTCACTGTCTCTAGCGCTAGCACCAAG
GGCCCATCGGTCTTCCCCCTGGCACCCTCCTCCAAGAGCACCTCTGGGGGCACAGCGGCCCTGGGCTGCCTGGTCAA
GGACTACTTCCCCGAACCGGTGACGGTGTCGTGGAACTCAGGCGCCCTGACCAGCGGCGTGCACACCTTCCCGGCTG
TCCTACAGTCCTCAGGACTCTACTCCCTCAGCAGCGTGGTGACCGTGCCCTCCAGCAGCTTGGGCACCCAGACCTAC
ATCTGCAACGTGAATCACAAGCCCAGCAACACCAAGGTGGACAAGAGAGTTGAGCCCAAATCTTGTGACAAAACTCA
CACATGCCCACCGTGCCCAGCACCTGAAGCCGCGGGGGGACCGTCAGTCTTCCTCTTCCCCCCAAAACCCAAGGACA
CCCTCATGATCTCCCGGACCCCTGAGGTCACATGCGTGGTGGTGGACGTGAGCCACGAAGACCCTGAGGTCAAGTTC
AACTGGTACGTGGACGGCGTGGAGGTGCATAATGCCAAGACAAAGCCGCGGGAGGAGCAGTACGCCAGCACGTACCG
TGTGGTCAGCGTCCTCACCGTCCTGCACCAGGACTGGCTGAATGGCAAGGAGTACAAGTGCGCGGTCTCCAACAAAG
CCCTCCCAGCCCCCATCGAGAAAACCATCTCCAAAGCCAAAGGGCAGCCCCGAGAACCACAGGTGTACACCCTGCCC
CCATCCCGGGATGAGCTGACCAAGAACCAGGTCAGCCTGACCTGCCTGGTCAAAGGCTTCTATCCCAGCGACATCGC
CGTGGAGTGGGAGAGCAATGGGCAGCCGGAGAACAACTACAAGACCACGCCTCCCGTGCTGGACTCCGACGGCTCCT
TCTTCCTCTATAGCAAGCTCACCGTGGACAAGAGCAGGTGGCAGCAGGGGAACGTCTTCTCATGCTCCGTGATGCAT
GAGGCTCTGCACAACCACTACACGCAGAAGAGCCTCTCCCTGTCTCCGGGTGGCGGTGGAGGGTCCGGCGGTGGTGG
ATCCGAGGTGCAGCTGTTGGAGTCTGGGGGAGGCTTGGTACAGCCTGGGGGGTCCCTGAGACTCTCCTGTGCAGCCT
CTGGATTCTCCTTCAGTAGCGGGTACGACATGTGCTGGGTCCGCCAGGCTCCAGGGAAGTGCCTGGAGTGGATCGCA
TGCATTGCTGCTGGTAGTGCTGGTATCACTTACGACGCGAACTGGGCGAAAGGCCGGTTCACCATCTCCAGAGACAA
TTCCAAGAACACGCTGTATCTGCAAATGAACAGCCTGAGAGCCGAGGACACGGCCGTATATTACTGTGCGAGATCGG
CGTTTTCGTTCGACTACGCCATGGACCTCTGGGGCCAGGGAACCCTGGTCACCGTCTCGAGCGGTGGAGGCGGTTCA
GGCGGAGGTGGAAGTGGTGGTGGCGGCTCTGGAGGCGGCGGATCTGACATCCAGATGACCCAGTCTCCTTCCACCCT
GTCTGCATCTGTAGGAGACAGAGTCACCATCACTTGCCAGGCCAGTCAGAGCATTAGTTCCCACTTAAACTGGTATC
AGCAGAAACCAGGGAAAGCCCCTAAGCTCCTGATCTATAAGGCATCCACTCTGGCATCTGGGGTCCCATCAAGGTTC
AGCGGCAGTGGATCTGGGACAGAATTTACTCTCACCATCAGCAGCCTGCAGCCTGATGATTTTGCAACTTATTACTG
CCAACAGGGTTATAGTTGGGGTAATGTTGATAATGTTTTCGGCTGCGGGACCAAGGTGGAGATCAAAGGTGGTGGCG
GCTCTGGAGGAGGAGGGTCCGGACGGTCGCTGGTGGAGTCTGGGGGAGGCTTGGTCCAGCCTGGGGGGTCCCTGAGA
CTCTCCTGTACTGCCTCTGGATTCACCATCAGTAGCTACCACATGCAGTGGGTCCGGCAGGCACCTGGGAAGTGCCT
GGAGTACATCGGAACCATTAGTAGTGGTGGTAATGTATACTACGCAAGCTCCGCTAGAGGCAGATTCACCATCTCCA
GACCCTCGTCCAAGAACACGGTGGATCTTCAAATGAACAGCCTGAGAGCCGAGGACACGGCTGTGTATTACTGTGCG
AGAGACTCTGGTTATAGTGATCCTATGTGGGGCCAGGGAACCCTGGTCACCGTCTCTTCAGGCGGTGGCGGTAGTGG
GGGAGGCGGTTCTGGCGGCGGAGGGTCCGGCGGTGGAGGATCAGACGTTGTGATGACCCAGTCTCCATCTTCCGTGT
CTGCATCTGTAGGAGACAGAGTCACCATCACCTGTCAGGCCAGTCAGAACATTAGGACTTACTTATCCTGGTATCAG
CAGAAACCAGGGAAAGCCCCTAAGCTCCTGATCTATGCTGCAGCCAATCTGGCATCTGGGGTCCCATCAAGGTTCAG
CGGCAGTGGATCTGGGACAGATTTCACTCTCACCATCAGCGACTTGGAACCTGGCGATGCTGCAACTTACTATTGTC
AGTCTACCTATCTTGGTACTGATTATGTTGGCGGTGCTTTCGGCTGTGGGACCAAGGTGGAGATCAAA
>SEQ ID 38 SI-1P2 chain A aa
DVVMTQSPSTLSASVGDRVTINCQASESISSWLAWYQQKPGKAPKLLIYEASKLASGVPSRFSGSGSGTEFTLTISS
LQPDDFATYYCQGYFYFISRTYVNSFGCGTKVEIKGGGGSGGGGSGGGGSGGGGSEVQLVESGGGLVQPGGSLRLSC
AASGFTISTNAMSWVRQAPGKCLEWIGVITGRDITYYASWAKGRFTISRDNSKNTLYLQMNSLRAEDTAVYYCARDG
GSSAITSNNIWGQGTLVTVSTGGGGSGGGGSQVQLKQSGPGLVQPSQSLSITCTVSGFSLTNYGVHWVRQSPGKGLE
WLGVIWSGGNTDYNTPFTSRLSINKDNSKSQVFFKMNSLQSNDTAIYYCARALTYYDYEFAYWGQGTLVTVSSASTK
GPSVFPLAPSSKSTSGGTAALGCLVKDYFPEPVTVSWNSGALTSGVHTFPAVLQSSGLYSLSSVVTVPSSSLGTQTY
ICNVNHKPSNTKVDKRVEPKSCDKTHTCPPCPAPEAAGGPSVFLFPPKPKDTLMISRTPEVTCVVVDVSHEDPEVKF
NWYVDGVEVHNAKTKPREEQYASTYRVVSVLTVLHQDWLNGKEYKCAVSNKALPAPIEKTISKAKGQPREPQVYTLP
PSRDELTKNQVSLTCLVKGFYPSDIAVEWESNGQPENNYKTTPPVLDSDGSFFLYSKLTVDKSRWQQGNVFSCSVMH
EALHNHYTQKSLSLSPGGGGGSGGGGSEVQLLESGGGLVQPGGSLRLSCAASGFSFSSGYDMCWVRQAPGKCLEWIA
CIAAGSAGITYDANWAKGRFTISRDNSKNTLYLQMNSLRAEDTAVYYCARSAFSFDYAMDLWGQGTLVTVSSGGGGS
GGGGSGGGGSGGGGSDIQMTQSPSTLSASVGDRVTITCQASQSISSHLNWYQQKPGKAPKLLIYKASTLASGVPSRF
SGSGSGTEFTLTISSLQPDDFATYYCQQGYSWGNVDNVFGCGTKVEIKGGGGSGGGGSGRSLVESGGGLVQPGGSLR
LSCTASGFTISSYHMQWVRQAPGKCLEYIGTISSGGNVYYASSARGRFTISRPSSKNTVDLQMNSLRAEDTAVYYCA
RDSGYSDPMWGQGTLVTVSSGGGGSGGGGSGGGGSGGGGSDVVMTQSPSSVSASVGDRVTITCQASQNIRTYLSWYQ
QKPGKAPKLLIYAAANLASGVPSRFSGSGSGTDFTLTISDLEPGDAATYYCQSTYLGTDYVGGAFGCGTKVEIK
>SEQ ID 39 SI-1P2 chain B nt
GACATCTTGCTGACTCAGTCTCCAGTCATCCTGTCTGTGAGTCCAGGAGAAAGAGTCAGTTTCTCCTGCAGGGCCAG
TCAGAGTATTGGCACAAACATACACTGGTATCAGCAAAGAACAAATGGTTCTCCAAGGCTTCTCATAAAGTATGCTT
CTGAGTCTATCTCTGGGATTCCTTCCAGGTTTAGTGGCAGTGGATCAGGGACAGATTTTACTCTTAGCATCAACAGT
GTGGAGTCTGAAGATATTGCAGATTATTACTGTCAACAAAATAATAACTGGCCAACCACGTTCGGTGCTGGGACCAA
GCTGGAGCTGAAACGTACGGTGGCTGCACCATCTGTCTTCATCTTCCCGCCATCTGATGAGCAGTTGAAATCTGGAA
CTGCCTCTGTTGTGTGCCTGCTGAATAACTTCTATCCCAGAGAGGCCAAAGTACAGTGGAAGGTGGATAACGCCCTC
CAATCGGGTAACTCCCAGGAGAGTGTCACAGAGCAGGACAGCAAGGACAGCACCTACAGCCTCAGCAGCACCCTGAC
GCTGAGCAAAGCAGACTACGAGAAACACAAAGTCTACGCCTGCGAAGTCACCCATCAGGGCCTGAGCTCGCCCGTCA
CAAAGAGCTTCAACAGGGGAGAGTGTGGCGGTGGAGGGTCCGGCGGTGGTGGATCCCAGTCTGCCCTGACTCAGCCT
GCCTCCGTGTCTGGGTCTCCTGGACAGTCGATCACCATCTCCTGCACTGGAACCAGCAGTGACGTTGGTGGTTATAA
CTTTGTCTCCTGGTACCAACAACACCCAGGCAAAGCCCCCAAACTCATGATCTATGATGTCAGTGATCGGCCCTCAG
GGGTGTCTGATCGCTTCTCCGGCTCCAAGTCTGGCAACACGGCCTCCCTGATCATCTCTGGCCTCCAGGCTGACGAC
GAGGCTGATTATTACTGCAGCTCATATGGGAGCAGCAGCACTCATGTGATTTTCGGCTGCGGGACCAAGGTGACCGT
CCTAGGTGGAGGCGGTTCAGGCGGAGGTGGTTCCGGCGGTGGCGGCTCCGGTGGAGGCGGCTCTCAGGTGCAATTGC
AGGAGTCGGGGGGAGGCCTGGTCAAGCCTGGAGGGTCCCTGAGACTCTCCTGTGCAGCCTCTGGATTCACCTTTAGT
AGTTATTGGATGAGCTGGGTCCGCCAGGCTCCAGGGAAGTGCCTGGAGTGGGTGGCCAACATAAACCGCGATGGAAG
TGCGAGTTACTATGTGGACTCTGTGAAGGGCCGATTCACCATCTCCAGAGACGACGCCAAGAACTCACTGTATCTGC
AAATGAACAGCCTGAGAGCTGAGGACACGGCTGTGTATTACTGTGCGAGAGATCGTGGGGTGGGCTACTTCGATCTC
TGGGGCCGTGGCACCCTGGTCACCGTCTCGAGC
>SEQ ID 40 SI-1P2 chain B aa
DILLTQSPVILSVSPGERVSFSCRASQSIGTNIHWYQQRTNGSPRLLIKYASESISGIPSRFSGSGSGTDFTLSINS
VESEDIADYYCQQNNNWPTTFGAGTKLELKRTVAAPSVFIFPPSDEQLKSGTASVVCLLNNFYPREAKVQWKVDNAL
QSGNSQESVTEQDSKDSTYSLSSTLTLSKADYEKHKVYACEVTHQGLSSPVTKSFNRGECGGGGSGGGGSQSALTQP
ASVSGSPGQSITISCTGTSSDVGGYNFVSWYQQHPGKAPKLMIYDVSDRPSGVSDRFSGSKSGNTASLIISGLQADD
EADYYCSSYGSSSTHVIFGCGTKVTVLGGGGSGGGGSGGGGSGGGGSQVQLQESGGGLVKPGGSLRLSCAASGFTFS
SYWMSWVRQAPGKCLEWVANINRDGSASYYVDSVKGRFTISRDDAKNSLYLQMNSLRAEDTAVYYCARDRGVGYFDL
WGRGTLVTVSS
>SEQ ID 41 SI-1P4 chain A nt
GACGTCGTGATGACCCAGTCTCCTTCCACCCTGTCTGCATCTGTAGGAGACAGAGTCACCATCAATTGCCAAGCCAG
TGAGAGCATTAGCAGTTGGTTAGCCTGGTATCAGCAGAAACCAGGGAAAGCCCCTAAGCTCCTGATCTATGAAGCAT
CCAAACTGGCATCTGGGGTCCCATCAAGGTTCAGCGGCAGTGGATCTGGGACAGAATTTACTCTCACCATCAGCAGC
CTGCAGCCTGATGATTTTGCAACTTATTACTGCCAAGGCTATTTTTATTTTATTAGTCGTACTTATGTAAATTCTTT
CGGCTGTGGGACCAAGGTGGAGATCAAAGGTGGAGGCGGTTCAGGCGGAGGTGGAAGTGGTGGTGGCGGCTCTGGAG
GCGGCGGATCTGAGGTGCAGCTGGTGGAGTCTGGGGGAGGCTTGGTCCAGCCTGGGGGGTCCCTGAGACTCTCCTGT
GCAGCCTCTGGATTCACCATCAGTACCAATGCAATGAGCTGGGTCCGCCAGGCTCCAGGGAAGTGCCTGGAGTGGAT
CGGAGTCATTACTGGTCGTGATATCACATACTACGCGAGCTGGGCGAAAGGCAGATTCACCATCTCCAGAGACAATT
CCAAGAACACGCTGTATCTTCAAATGAACAGCCTGAGAGCCGAGGACACGGCTGTGTATTACTGTGCGAGAGACGGT
GGTTCTTCTGCTATTACTAGTAACAACATTTGGGGCCAGGGAACCCTGGTCACCGTGTCGACAGGCGGTGGAGGGTC
CGGCGGTGGTGGATCACAGGTGCAGCTGCAGGAGTCGGGCCCAGGACTGGTGAAGCCTTCGGAGACCCTGTCCCTCA
CCTGCACTGTCTCTGGTGGCTCCGTCAGCAGTGGTGATTACTACTGGACCTGGATCCGGCAGTCCCCAGGGAAGGGA
CTGGAGTGGATTGGACACATCTATTACAGTGGGAACACCAATTATAACCCCTCCCTCAAGAGCCGACTCACCATATC
AATTGACACGTCCAAGACTCAGTTCTCCCTGAAGCTGAGTTCTGTGACCGCTGCGGACACGGCCATTTATTACTGTG
TGCGAGATCGAGTGACTGGTGCTTTTGATATCTGGGGCCAAGGGACAATGGTCACCGTCTCGAGCGCTAGCACCAAG
GGCCCATCGGTCTTCCCCCTGGCACCCTCCTCCAAGAGCACCTCTGGGGGCACAGCGGCCCTGGGCTGCCTGGTCAA
GGACTACTTCCCCGAACCGGTGACGGTGTCGTGGAACTCAGGCGCCCTGACCAGCGGCGTGCACACCTTCCCGGCTG
TCCTACAGTCCTCAGGACTCTACTCCCTCAGCAGCGTGGTGACCGTGCCCTCCAGCAGCTTGGGCACCCAGACCTAC
ATCTGCAACGTGAATCACAAGCCCAGCAACACCAAGGTGGACAAGAGAGTTGAGCCCAAATCTTGTGACAAAACTCA
CACATGCCCACCGTGCCCAGCACCTGAAGCCGCGGGGGGACCGTCAGTCTTCCTCTTCCCCCCAAAACCCAAGGACA
CCCTCATGATCTCCCGGACCCCTGAGGTCACATGCGTGGTGGTGGACGTGAGCCACGAAGACCCTGAGGTCAAGTTC
AACTGGTACGTGGACGGCGTGGAGGTGCATAATGCCAAGACAAAGCCGCGGGAGGAGCAGTACGCCAGCACGTACCG
TGTGGTCAGCGTCCTCACCGTCCTGCACCAGGACTGGCTGAATGGCAAGGAGTACAAGTGCGCGGTCTCCAACAAAG
CCCTCCCAGCCCCCATCGAGAAAACCATCTCCAAAGCCAAAGGGCAGCCCCGAGAACCACAGGTGTACACCCTGCCC
CCATCCCGGGATGAGCTGACCAAGAACCAGGTCAGCCTGACCTGCCTGGTCAAAGGCTTCTATCCCAGCGACATCGC
CGTGGAGTGGGAGAGCAATGGGCAGCCGGAGAACAACTACAAGACCACGCCTCCCGTGCTGGACTCCGACGGCTCCT
TCTTCCTCTATAGCAAGCTCACCGTGGACAAGAGCAGGTGGCAGCAGGGGAACGTCTTCTCATGCTCCGTGATGCAT
GAGGCTCTGCACAACCACTACACGCAGAAGAGCCTCTCCCTGTCTCCGGGTGGCGGTGGAGGGTCCGGCGGTGGTGG
ATCCGAGGTGCAGCTGTTGGAGTCTGGGGGAGGCTTGGTACAGCCTGGGGGGTCCCTGAGACTCTCCTGTGCAGCCT
CTGGATTCTCCTTCAGTAGCGGGTACGACATGTGCTGGGTCCGCCAGGCTCCAGGGAAGTGCCTGGAGTGGATCGCA
TGCATTGCTGCTGGTAGTGCTGGTATCACTTACGACGCGAACTGGGCGAAAGGCCGGTTCACCATCTCCAGAGACAA
TTCCAAGAACACGCTGTATCTGCAAATGAACAGCCTGAGAGCCGAGGACACGGCCGTATATTACTGTGCGAGATCGG
CGTTTTCGTTCGACTACGCCATGGACCTCTGGGGCCAGGGAACCCTGGTCACCGTCTCGAGCGGTGGAGGCGGTTCA
GGCGGAGGTGGAAGTGGTGGTGGCGGCTCTGGAGGCGGCGGATCTGACATCCAGATGACCCAGTCTCCTTCCACCCT
GTCTGCATCTGTAGGAGACAGAGTCACCATCACTTGCCAGGCCAGTCAGAGCATTAGTTCCCACTTAAACTGGTATC
AGCAGAAACCAGGGAAAGCCCCTAAGCTCCTGATCTATAAGGCATCCACTCTGGCATCTGGGGTCCCATCAAGGTTC
AGCGGCAGTGGATCTGGGACAGAATTTACTCTCACCATCAGCAGCCTGCAGCCTGATGATTTTGCAACTTATTACTG
CCAACAGGGTTATAGTTGGGGTAATGTTGATAATGTTTTCGGCTGCGGGACCAAGGTGGAGATCAAAGGTGGTGGCG
GCTCTGGAGGAGGAGGGTCCGGACGGTCGCTGGTGGAGTCTGGGGGAGGCTTGGTCCAGCCTGGGGGGTCCCTGAGA
CTCTCCTGTACTGCCTCTGGATTCACCATCAGTAGCTACCACATGCAGTGGGTCCGGCAGGCACCTGGGAAGTGCCT
GGAGTACATCGGAACCATTAGTAGTGGTGGTAATGTATACTACGCAAGCTCCGCTAGAGGCAGATTCACCATCTCCA
GACCCTCGTCCAAGAACACGGTGGATCTTCAAATGAACAGCCTGAGAGCCGAGGACACGGCTGTGTATTACTGTGCG
AGAGACTCTGGTTATAGTGATCCTATGTGGGGCCAGGGAACCCTGGTCACCGTCTCTTCAGGCGGTGGCGGTAGTGG
GGGAGGCGGTTCTGGCGGCGGAGGGTCCGGCGGTGGAGGATCAGACGTTGTGATGACCCAGTCTCCATCTTCCGTGT
CTGCATCTGTAGGAGACAGAGTCACCATCACCTGTCAGGCCAGTCAGAACATTAGGACTTACTTATCCTGGTATCAG
CAGAAACCAGGGAAAGCCCCTAAGCTCCTGATCTATGCTGCAGCCAATCTGGCATCTGGGGTCCCATCAAGGTTCAG
CGGCAGTGGATCTGGGACAGATTTCACTCTCACCATCAGCGACTTGGAACCTGGCGATGCTGCAACTTACTATTGTC
AGTCTACCTATCTTGGTACTGATTATGTTGGCGGTGCTTTCGGCTGTGGGACCAAGGTGGAGATCAAA
>SEQ ID 42 SI-1P4 chain A aa
DVVMTQSPSTLSASVGDRVTINCQASESISSWLAWYQQKPGKAPKLLIYEASKLASGVPSRFSGSGSGTEFTLTISS
LQPDDFATYYCQGYFYFISRTYVNSFGCGTKVEIKGGGGSGGGGSGGGGSGGGGSEVQLVESGGGLVQPGGSLRLSC
AASGFTISTNAMSWVRQAPGKCLEWIGVITGRDITYYASWAKGRFTISRDNSKNTLYLQMNSLRAEDTAVYYCARDG
GSSAITSNNIWGQGTLVTVSTGGGGSGGGGSQVQLQESGPGLVKPSETLSLTCTVSGGSVSSGDYYWTWIRQSPGKG
LEWIGHIYYSGNTNYNPSLKSRLTISIDTSKTQFSLKLSSVTAADTAIYYCVRDRVTGAFDIWGQGTMVTVSSASTK
GPSVFPLAPSSKSTSGGTAALGCLVKDYFPEPVTVSWNSGALTSGVHTFPAVLQSSGLYSLSSVVTVPSSSLGTQTY
ICNVNHKPSNTKVDKRVEPKSCDKTHTCPPCPAPEAAGGPSVFLFPPKPKDTLMISRTPEVTCVVVDVSHEDPEVKF
NWYVDGVEVHNAKTKPREEQYASTYRVVSVLTVLHQDWLNGKEYKCAVSNKALPAPIEKTISKAKGQPREPQVYTLP
PSRDELTKNQVSLTCLVKGFYPSDIAVEWESNGQPENNYKTTPPVLDSDGSFFLYSKLTVDKSRWQQGNVFSCSVMH
EALHNHYTQKSLSLSPGGGGGSGGGGSEVQLLESGGGLVQPGGSLRLSCAASGFSFSSGYDMCWVRQAPGKCLEWIA
CIAAGSAGITYDANWAKGRFTISRDNSKNTLYLQMNSLRAEDTAVYYCARSAFSFDYAMDLWGQGTLVTVSSGGGGS
GGGGSGGGGSGGGGSDIQMTQSPSTLSASVGDRVTITCQASQSISSHLNWYQQKPGKAPKLLIYKASTLASGVPSRF
SGSGSGTEFTLTISSLQPDDFATYYCQQGYSWGNVDNVFGCGTKVEIKGGGGSGGGGSGRSLVESGGGLVQPGGSLR
LSCTASGFTISSYHMQWVRQAPGKCLEYIGTISSGGNVYYASSARGRFTISRPSSKNTVDLQMNSLRAEDTAVYYCA
RDSGYSDPMWGQGTLVTVSSGGGGSGGGGSGGGGSGGGGSDVVMTQSPSSVSASVGDRVTITCQASQNIRTYLSWYQ
QKPGKAPKLLIYAAANLASGVPSRFSGSGSGTDFTLTISDLEPGDAATYYCQSTYLGTDYVGGAFGCGTKVEIK
>SEQ ID 43 SI-1P4 chain B nt
GACATCCAGATGACCCAGTCTCCATCCTCCCTGTCTGCATCTGTAGGAGACAGAGTCACCATCACTTGCCAGGCGAG
TCAGGACATCAGCAACTATTTAAATTGGTATCAGCAGAAACCAGGGAAAGCCCCTAAACTCCTGATCTACGATGCAT
CCAATTTGGAAACAGGGGTCCCATCAAGGTTCAGTGGAAGTGGATCTGGGACAGATTTTACTTTCACCATCAGCAGC
CTGCAGCCTGAAGATATTGCAACATATTTCTGTCAACACTTTGATCATCTCCCGCTCGCTTTCGGCGGAGGGACCAA
GGTGGAAATTAAACGTACGGTGGCTGCACCATCTGTCTTCATCTTCCCGCCATCTGATGAGCAGTTGAAATCTGGAA
CTGCCTCTGTTGTGTGCCTGCTGAATAACTTCTATCCCAGAGAGGCCAAAGTACAGTGGAAGGTGGATAACGCCCTC
CAATCGGGTAACTCCCAGGAGAGTGTCACAGAGCAGGACAGCAAGGACAGCACCTACAGCCTCAGCAGCACCCTGAC
GCTGAGCAAAGCAGACTACGAGAAACACAAAGTCTACGCCTGCGAAGTCACCCATCAGGGCCTGAGCTCGCCCGTCA
CAAAGAGCTTCAACAGGGGAGAGTGTGGCGGTGGAGGGTCCGGCGGTGGTGGATCCCAGTCTGCCCTGACTCAGCCT
GCCTCCGTGTCTGGGTCTCCTGGACAGTCGATCACCATCTCCTGCACTGGAACCAGCAGTGACGTTGGTGGTTATAA
CTTTGTCTCCTGGTACCAACAACACCCAGGCAAAGCCCCCAAACTCATGATCTATGATGTCAGTGATCGGCCCTCAG
GGGTGTCTGATCGCTTCTCCGGCTCCAAGTCTGGCAACACGGCCTCCCTGATCATCTCTGGCCTCCAGGCTGACGAC
GAGGCTGATTATTACTGCAGCTCATATGGGAGCAGCAGCACTCATGTGATTTTCGGCTGCGGGACCAAGGTGACCGT
CCTAGGTGGAGGCGGTTCAGGCGGAGGTGGTTCCGGCGGTGGCGGCTCCGGTGGAGGCGGCTCTCAGGTGCAATTGC
AGGAGTCGGGGGGAGGCCTGGTCAAGCCTGGAGGGTCCCTGAGACTCTCCTGTGCAGCCTCTGGATTCACCTTTAGT
AGTTATTGGATGAGCTGGGTCCGCCAGGCTCCAGGGAAGTGCCTGGAGTGGGTGGCCAACATAAACCGCGATGGAAG
TGCGAGTTACTATGTGGACTCTGTGAAGGGCCGATTCACCATCTCCAGAGACGACGCCAAGAACTCACTGTATCTGC
AAATGAACAGCCTGAGAGCTGAGGACACGGCTGTGTATTACTGTGCGAGAGATCGTGGGGTGGGCTACTTCGATCTC
TGGGGCCGTGGCACCCTGGTCACCGTCTCGAGC
>SEQ ID 44 SI-1P4 chain B aa
DIQMTQSPSSLSASVGDRVTITCQASQDISNYLNWYQQKPGKAPKLLIYDASNLETGVPSRFSGSGSGTDFTFTISS
LQPEDIATYFCQHFDHLPLAFGGGTKVEIKRTVAAPSVFIFPPSDEQLKSGTASVVCLLNNFYPREAKVQWKVDNAL
QSGNSQESVTEQDSKDSTYSLSSTLTLSKADYEKHKVYACEVTHQGLSSPVTKSFNRGECGGGGSGGGGSQSALTQP
ASVSGSPGQSITISCTGTSSDVGGYNFVSWYQQHPGKAPKLMIYDVSDRPSGVSDRFSGSKSGNTASLIISGLQADD
EADYYCSSYGSSSTHVIFGCGTKVTVLGGGGSGGGGSGGGGSGGGGSQVQLQESGGGLVKPGGSLRLSCAASGFTFS
SYWMSWVRQAPGKCLEWVANINRDGSASYYVDSVKGRFTISRDDAKNSLYLQMNSLRAEDTAVYYCARDRGVGYFDL
WGRGTLVTVSS
>SEQ ID 45 SI-39P1 chain A nt
GACGTCGTGATGACCCAGTCTCCTTCCACCCTGTCTGCATCTGTAGGAGACAGAGTCACCATCAATTGCCAAGCCAG
TGAGAGCATTAGCAGTTGGTTAGCCTGGTATCAGCAGAAACCAGGGAAAGCCCCTAAGCTCCTGATCTATGAAGCAT
CCAAACTGGCATCTGGGGTCCCATCAAGGTTCAGCGGCAGTGGATCTGGGACAGAGTTCACTCTCACCATCAGCAGC
CTGCAGCCTGATGATTTTGCAACTTATTACTGCCAAGGCTATTTTTATTTTATTAGTCGTACTTATGTAAATTCTTT
CGGCGGAGGGACCAAGGTGGAGATCAAAGGCGGTGGCGGTAGTGGGGGAGGCGGTTCTGGCGGCGGAGGGTCCGGCG
GTGGAGGATCAGAGGTGCAGCTGGTGGAGTCTGGGGGAGGCTTGGTCCAGCCTGGGGGGTCCCTGAGACTCTCCTGT
GCAGCCTCTGGATTCACCATCAGTACCAATGCAATGAGCTGGGTCCGCCAGGCTCCAGGGAAGGGGCTGGAGTGGAT
CGGAGTCATTACTGGTCGTGATATCACATACTACGCGAGCTGGGCGAAAGGCAGATTCACCATCTCCAGAGACAATT
CCAAGAACACGCTGTATCTTCAAATGAACAGCCTGAGAGCCGAGGACACGGCTGTGTATTACTGTGCGCGCGACGGT
GGATCATCTGCTATTACTAGTAACAACATTTGGGGCCAAGGAACTCTGGTCACCGTTTCTTCAGGCGGTGGAGGGTC
CGGCGGTGGTGGATCCGATGTGCAGCTTCAGGAGTCGGGACCTAGCCTGGTGAAACCTTCTCAGTCTCTGTCCCTCA
CCTGCACTGTCACTGGCTACTCAATCACCAGTGATTTTGCCTGGAACTGGATTCGGCAGTTTCCAGGAAACAAGCTG
GAGTGGATGGGCTACATAAGTTATAGTGGTAACACTAGGTACAACCCATCTCTCAAAAGTCGAATCTCTATCACTCG
CGACACATCCAAGAACCAATTCTTCCTGCAGTTGAACTCTGTGACTATTGAGGACACAGCCACATATTACTGTGTAA
CGGCGGGACGCGGGTTTCCTTATTGGGGCCAAGGGACTCTGGTCACTGTCTCTGCAGCTAGCACCAAGGGCCCATCG
GTCTTCCCCCTGGCACCCTCCTCCAAGAGCACCTCTGGGGGCACAGCGGCCCTGGGCTGCCTGGTCAAGGACTACTT
CCCCGAACCGGTGACGGTGTCGTGGAACTCAGGCGCCCTGACCAGCGGCGTGCACACCTTCCCGGCTGTCCTACAGT
CCTCAGGACTCTACTCCCTCAGCAGCGTGGTGACCGTGCCCTCCAGCAGCTTGGGCACCCAGACCTACATCTGCAAC
GTGAATCACAAGCCCAGCAACACCAAGGTGGACAAGAGAGTTGAGCCCAAATCTTGTGACAAAACTCACACATGCCC
ACCGTGCCCAGCACCTGAAGCCGCGGGGGCACCGTCAGTCTTCCTCTTCCCCCCAAAACCCAAGGACACCCTCATGA
TCTCCCGGACCCCTGAGGTCACATGCGTGGTGGTGGACGTGAGCCACGAAGACCCTGAGGTCAAGTTCAACTGGTAC
GTGGACGGCGTGGAGGTGCATAATGCCAAGACAAAGCCGCGGGAGGAGCAGTACAACAGCACGTACCGTGTGGTCAG
CGTCCTCACCGTCCTGCACCAGGACTGGCTGAATGGCAAGGAGTACAAGTGCGCGGTCTCCAACAAAGCCCTCCCAG
CCCCCATCGAGAAAACCATCTCCAAAGCCAAAGGGCAGCCCCGAGAACCACAGGTGTACACCCTGCCCCCATCCCGG
GATGAGCTGACCAAGAACCAGGTCAGCCTGACCTGCCTGGTCAAAGGCTTCTATCCCAGCGACATCGCCGTGGAGTG
GGAGAGCAATGGGCAGCCGGAGAACAACTACAAGACCACGCCTCCCGTGCTGGACTCCGACGGCTCCTTCTTCCTCT
ATAGCAAGCTCACCGTGGACAAGAGCAGGTGGCAGCAGGGGAACGTCTTCTCATGCTCCGTGATGCATGAGGCTCTG
CACAACCACTACACGCAGAAGAGCCTCTCCCTGTCTCCGGGTGGCGGTGGAGGGTCCGGCGGTGGTGGATCCGAGGT
GCAGCTGTTGGAGTCTGGGGGAGGCTTGGTACAGCCTGGGGGGTCCCTGAGACTCTCCTGTGCAGCCTCTGGATTCT
CCTTCAGTAGCGGGTACGACATGTGCTGGGTCCGCCAGGCTCCAGGGAAGGGGCTGGAGTGGATCGCATGCATTGCT
GCTGGTAGTGCTGGTATCACTTACGACGCGAACTGGGCGAAAGGCCGGTTCACCATCTCCAGAGACAATTCCAAGAA
CACGCTGTATCTGCAAATGAACAGCCTGAGAGCCGAGGACACGGCCGTATATTACTGTGCGAGATCGGCGTTTTCGT
TCGACTACGCCATGGACCTCTGGGGCCAGGGAACCCTGGTCACCGTCTCGAGCGGCGGTGGCGGTAGTGGGGGAGGC
GGTTCTGGCGGCGGAGGGTCCGGCGGTGGAGGATCAGACATCCAGATGACCCAGTCTCCTTCCACCCTGTCTGCATC
TGTAGGAGACAGAGTCACCATCACTTGCCAGGCCAGTCAGAGCATTAGTTCCCACTTAAACTGGTATCAGCAGAAAC
CAGGGAAAGCCCCTAAGCTCCTGATCTATAAGGCATCCACTCTGGCATCTGGGGTCCCATCAAGGTTCAGCGGCAGT
GGATCTGGGACAGAATTTACTCTCACCATCAGCAGCCTGCAGCCTGATGATTTTGCAACTTATTACTGCCAACAGGG
TTATAGTTGGGGTAATGTTGATAATGTTTTCGGCGGAGGGACCAAGGTGGAGATCAAAGGCGGTGGAGGGTCCGGCG
GTGGTGGATCCCAGTCGCTGGTGGAGTCTGGGGGAGGCTTGGTACAGCCTGGGGGGTCCCTGAGACTCTCCTGTGCA
GCCTCTGGATTCTCCTTCAGTAGCAACTACTGGATATGCTGGGTCCGCCAGGCTCCAGGGAAGGGGCTGGAGTGGAT
CGCATGTATTTATGTTGGTAGTAGTGGTGACACTTACTACGCGAGCTCCGCGAAAGGCCGGTTCACCATCTCCAGAG
ACAATTCCAAGAACACGCTGTATCTGCAAATGAACAGCCTGAGAGCCGAGGACACGGCCGTATATTACTGTGCGAGA
GATAGTAGTAGTTATTATATGTTTAACTTGTGGGGCCAGGGAACCCTGGTCACCGTCTCTTCAGGCGGTGGCGGTAG
TGGGGGAGGCGGTTCTGGCGGCGGAGGGTCCGGCGGTGGAGGATCAGCCCTTGTGATGACCCAGTCTCCTTCCACCC
TGTCTGCATCTGTAGGAGACAGAGTCACCATCAATTGCCAGGCCAGTGAGGACATTGATACCTATTTAGCCTGGTAT
CAGCAGAAACCAGGGAAAGCCCCTAAGCTCCTGATCTTTTACGCATCCGATCTGGCATCTGGGGTCCCATCAAGGTT
CAGCGGCAGTGGATCTGGGACAGAATTTACTCTCACCATCAGCAGCCTGCAGCCTGATGATTTTGCAACTTATTACT
GCCAAGGCGGTTACTATACTAGTAGTGCTGATACGAGGGGTGCTTTCGGCGGAGGGACCAAGGTGGAGATCAAA
>SEQ ID 46 SI-39P1 chain A aa
DVVMTQSPSTLSASVGDRVTINCQASESISSWLAWYQQKPGKAPKLLIYEASKLASGVPSRFSGSGSGTEFTLTISS
LQPDDFATYYCQGYFYFISRTYVNSFGGGTKVEIKGGGGSGGGGSGGGGSGGGGSEVQLVESGGGLVQPGGSLRLSC
AASGFTISTNAMSWVRQAPGKGLEWIGVITGRDITYYASWAKGRFTISRDNSKNTLYLQMNSLRAEDTAVYYCARDG
GSSAITSNNIWGQGTLVTVSSGGGGSGGGGSDVQLQESGPSLVKPSQSLSLTCTVTGYSITSDFAWNWIRQFPGNKL
EWMGYISYSGNTRYNPSLKSRISITRDTSKNQFFLQLNSVTIEDTATYYCVTAGRGFPYWGQGTLVTVSAASTKGPS
VFPLAPSSKSTSGGTAALGCLVKDYFPEPVTVSWNSGALTSGVHTFPAVLQSSGLYSLSSVVTVPSSSLGTQTYICN
VNHKPSNTKVDKRVEPKSCDKTHTCPPCPAPEAAGAPSVFLFPPKPKDTLMISRTPEVTCVVVDVSHEDPEVKFNWY
VDGVEVHNAKTKPREEQYNSTYRVVSVLTVLHQDWLNGKEYKCAVSNKALPAPIEKTISKAKGQPREPQVYTLPPSR
DELTKNQVSLTCLVKGFYPSDIAVEWESNGQPENNYKTTPPVLDSDGSFFLYSKLTVDKSRWQQGNVFSCSVMHEAL
HNHYTQKSLSLSPGGGGGSGGGGSEVQLLESGGGLVQPGGSLRLSCAASGFSFSSGYDMCWVRQAPGKGLEWIACIA
AGSAGITYDANWAKGRFTISRDNSKNTLYLQMNSLRAEDTAVYYCARSAFSFDYAMDLWGQGTLVTVSSGGGGSGGG
GSGGGGSGGGGSDIQMTQSPSTLSASVGDRVTITCQASQSISSHLNWYQQKPGKAPKLLIYKASTLASGVPSRFSGS
GSGTEFTLTISSLQPDDFATYYCQQGYSWGNVDNVFGGGTKVEIKGGGGSGGGGSQSLVESGGGLVQPGGSLRLSCA
ASGFSFSSNYWICWVRQAPGKGLEWIACIYVGSSGDTYYASSAKGRFTISRDNSKNTLYLQMNSLRAEDTAVYYCAR
DSSSYYMFNLWGQGTLVTVSSGGGGSGGGGSGGGGSGGGGSALVMTQSPSTLSASVGDRVTINCQASEDIDTYLAWY
QQKPGKAPKLLIFYASDLASGVPSRFSGSGSGTEFTLTISSLQPDDFATYYCQGGYYTSSADTRGAFGGGTKVEIK
>SEQ ID 47 SI-39P1 chain B nt
GACATCCTGATGACCCAATCTCCATCCTCCATGTCTGTATCTCTGGGAGACACAGTCAGCATCACTTGCCATTCAAG
TCAGGACATTAACAGTAATATAGGGTGGTTGCAGCAGAGACCAGGGAAATCATTTAAGGGCCTGATCTATCATGGAA
CCAACTTGGACGATGAAGTTCCATCAAGGTTCAGTGGCAGTGGATCTGGAGCCGATTATTCTCTCACCATCAGCAGC
CTGGAATCTGAAGATTTTGCAGACTATTACTGTGTACAGTATGCTCAGTTTCCGTGGACGTTCGGTGGAGGCACCAA
GCTGGAAATCAAACGTACGGTGGCTGCACCATCTGTCTTCATCTTCCCGCCATCTGATGAGCAGTTGAAATCTGGAA
CTGCCTCTGTTGTGTGCCTGCTGAATAACTTCTATCCCAGAGAGGCCAAAGTACAGTGGAAGGTGGATAACGCCCTC
CAATCGGGTAACTCCCAGGAGAGTGTCACAGAGCAGGACAGCAAGGACAGCACCTACAGCCTCAGCAGCACCCTGAC
GCTGAGCAAAGCAGACTACGAGAAACACAAAGTCTACGCCTGCGAAGTCACCCATCAGGGCCTGAGCTCGCCCGTCA
CAAAGAGCTTCAACAGGGGAGAGTGTGGCGGTGGAGGGTCCGGCGGTGGTGGATCCCAGTCTGCCCTGACTCAGCCT
GCCTCCGTGTCTGGGTCTCCTGGACAGTCGATCACCATCTCCTGCACTGGAACCAGCAGTGACGTTGGTGGTTATAA
CTTTGTCTCCTGGTACCAACAACACCCAGGCAAAGCCCCCAAACTCATGATCTATGATGTCAGTGATCGGCCCTCAG
GGGTGTCTGATCGCTTCTCCGGCTCCAAGTCTGGCAACACGGCCTCCCTGATCATCTCTGGCCTCCAGGCTGACGAC
GAGGCTGATTATTACTGCAGCTCATATGGGAGCAGCAGCACTCATGTGATTTTCGGCGGAGGGACCAAGGTGACCGT
CCTAGGTGGAGGCGGTTCAGGCGGAGGTGGTTCCGGCGGTGGCGGCTCCGGTGGAGGCGGCTCTCAGGTGCAATTGC
AGGAGTCGGGGGGAGGCCTGGTCAAGCCTGGAGGGTCCCTGAGACTCTCCTGTGCAGCCTCTGGATTCACCTTTAGT
AGTTATTGGATGAGCTGGGTCCGCCAGGCTCCAGGGAAGGGGCTGGAGTGGGTGGCCAACATAAACCGCGATGGAAG
TGCGAGTTACTATGTGGACTCTGTGAAGGGCCGATTCACCATCTCCAGAGACGACGCCAAGAACTCACTGTATCTGC
AAATGAACAGCCTGAGAGCTGAGGACACGGCTGTGTATTACTGTGCGAGAGATCGTGGGGTGGGCTACTTCGATCTC
TGGGGCCGTGGCACCCTGGTCACCGTCTCGAGC
>SEQ ID 48 SI-39P1 chain B aa
DILMTQSPSSMSVSLGDTVSITCHSSQDINSNIGWLQQRPGKSFKGLIYHGTNLDDEVPSRFSGSGSGADYSLTISS
LESEDFADYYCVQYAQFPWTFGGGTKLEIKRTVAAPSVFIFPPSDEQLKSGTASVVCLLNNFYPREAKVQWKVDNAL
QSGNSQESVTEQDSKDSTYSLSSTLTLSKADYEKHKVYACEVTHQGLSSPVTKSFNRGECGGGGSGGGGSQSALTQP
ASVSGSPGQSITISCTGTSSDVGGYNFVSWYQQHPGKAPKLMIYDVSDRPSGVSDRFSGSKSGNTASLIISGLQADD
EADYYCSSYGSSSTHVIFGGGTKVTVLGGGGSGGGGSGGGGSGGGGSQVQLQESGGGLVKPGGSLRLSCAASGFTFS
SYWMSWVRQAPGKGLEWVANINRDGSASYYVDSVKGRFTISRDDAKNSLYLQMNSLRAEDTAVYYCARDRGVGYFDL
WGRGTLVTVSS
>SEQ ID 49 SI-38P5 chain A nt
GACGTCGTGATGACCCAGTCTCCTTCCACCCTGTCTGCATCTGTAGGAGACAGAGTCACCATCAATTGCCAAGCCAG
TGAGAGCATTAGCAGTTGGTTAGCCTGGTATCAGCAGAAACCAGGGAAAGCCCCTAAGCTCCTGATCTATGAAGCAT
CCAAACTGGCATCTGGGGTCCCATCAAGGTTCAGCGGCAGTGGATCTGGGACAGAATTTACTCTCACCATCAGCAGC
CTGCAGCCTGATGATTTTGCAACTTATTACTGCCAAGGCTATTTTTATTTTATTAGTCGTACTTATGTAAATTCTTT
CGGCGGAGGGACCAAGGTGGAGATCAAAGGCGGTGGCGGTAGTGGGGGAGGCGGTTCTGGCGGCGGAGGGTCCGGCG
GTGGAGGATCAGAGGTGCAGCTGGTGGAGTCTGGGGGAGGCTTGGTCCAGCCTGGGGGGTCCCTGAGACTCTCCTGT
GCAGCCTCTGGATTCACCATCAGTACCAATGCAATGAGCTGGGTCCGCCAGGCTCCAGGGAAGGGGCTGGAGTGGAT
CGGAGTCATTACTGGTCGTGATATCACATACTACGCGAGCTGGGCGAAAGGCAGATTCACCATCTCCAGAGACAATT
CCAAGAACACGCTGTATCTTCAAATGAACAGCCTGAGAGCCGAGGACACGGCTGTGTATTACTGTGCGAGAGACGGT
GGTTCTTCTGCTATTACTAGTAACAACATTTGGGGCCAGGGAACCCTGGTCACCGTGTCGACAGGCGGTGGAGGGTC
CGGCGGTGGTGGATCACAGGTGCAGCTGCAGCAGCCCGGCGCCGAGCTGGTGAAGCCCGGCGCCAGCGTGAAGATGA
GCTGCAAGGCCAGCGGCTACACCTTCACCAGCTACAACATGCACTGGGTGAAGCAGACCCCCGGCCGGGGCCTGGAG
TGGATCGGCGCCATCTACCCCGGCAACGGCGACACCAGCTACAACCAGAAGTTCAAGGGCAAGGCCACCCTGACCGC
CGACAAGAGCAGCAGCACCGCCTACATGCAGCTGAGCAGCCTGACCAGCGAGGACAGCGCCGTGTACTACTGCGCCC
GGAGCACCTACTACGGCGGCGACTGGTACTTCAACGTGTGGGGCGCCGGCACCACCGTGACCGTGAGCGCCGCTAGC
ACCAAGGGCCCATCGGTCTTCCCCCTGGCACCCTCCTCCAAGAGCACCTCTGGGGGCACAGCGGCCCTGGGCTGCCT
GGTCAAGGACTACTTCCCCGAACCGGTGACGGTGTCGTGGAACTCAGGCGCCCTGACCAGCGGCGTGCACACCTTCC
CGGCTGTCCTACAGTCCTCAGGACTCTACTCCCTCAGCAGCGTGGTGACCGTGCCCTCCAGCAGCTTGGGCACCCAG
ACCTACATCTGCAACGTGAATCACAAGCCCAGCAACACCAAGGTGGACAAGAGAGTTGAGCCCAAATCTTGTGACAA
AACTCACACATGCCCACCGTGCCCAGCACCTGAAGCCGCGGGGGCACCGTCAGTCTTCCTCTTCCCCCCAAAACCCA
AGGACACCCTCATGATCTCCCGGACCCCTGAGGTCACATGCGTGGTGGTGGACGTGAGCCACGAAGACCCTGAGGTC
AAGTTCAACTGGTACGTGGACGGCGTGGAGGTGCATAATGCCAAGACAAAGCCGCGGGAGGAGCAGTACAACAGCAC
GTACCGTGTGGTCAGCGTCCTCACCGTCCTGCACCAGGACTGGCTGAATGGCAAGGAGTACAAGTGCGCGGTCTCCA
ACAAAGCCCTCCCAGCCCCCATCGAGAAAACCATCTCCAAAGCCAAAGGGCAGCCCCGAGAACCACAGGTGTACACC
CTGCCCCCATCCCGGGATGAGCTGACCAAGAACCAGGTCAGCCTGACCTGCCTGGTCAAAGGCTTCTATCCCAGCGA
CATCGCCGTGGAGTGGGAGAGCAATGGGCAGCCGGAGAACAACTACAAGACCACGCCTCCCGTGCTGGACTCCGACG
GCTCCTTCTTCCTCTATAGCAAGCTCACCGTGGACAAGAGCAGGTGGCAGCAGGGGAACGTCTTCTCATGCTCCGTG
ATGCATGAGGCTCTGCACAACCACTACACGCAGAAGAGCCTCTCCCTGTCTCCGGGTGGCGGTGGAGGGTCCGGCGG
TGGTGGATCCGAGGTGCAGCTGTTGGAGTCTGGGGGAGGCTTGGTACAGCCTGGGGGGTCCCTGAGACTCTCCTGTG
CAGCCTCTGGATTCTCCTTCAGTAGCGGGTACGACATGTGCTGGGTCCGCCAGGCTCCAGGGAAGGGGCTGGAGTGG
ATCGCATGCATTGCTGCTGGTAGTGCTGGTATCACTTACGACGCGAACTGGGCGAAAGGCCGGTTCACCATCTCCAG
AGACAATTCCAAGAACACGCTGTATCTGCAAATGAACAGCCTGAGAGCCGAGGACACGGCCGTATATTACTGTGCGA
GATCGGCGTTTTCGTTCGACTACGCCATGGACCTCTGGGGCCAGGGAACCCTGGTCACCGTCTCGAGCGGTGGAGGC
GGATCTGGCGGAGGTGGTTCCGGCGGTGGCGGCTCCGGTGGAGGCGGCTCTGACATCCAGATGACCCAGTCTCCTTC
CACCCTGTCTGCATCTGTAGGAGACAGAGTCACCATCACTTGCCAGGCCAGTCAGAGCATTAGTTCCCACTTAAACT
GGTATCAGCAGAAACCAGGGAAAGCCCCTAAGCTCCTGATCTATAAGGCATCCACTCTGGCATCTGGGGTCCCATCA
AGGTTCAGCGGCAGTGGATCTGGGACAGAATTTACTCTCACCATCAGCAGCCTGCAGCCTGATGATTTTGCAACTTA
TTACTGCCAACAGGGTTATAGTTGGGGTAATGTTGATAATGTTTTCGGCGGAGGGACCAAGGTGGAGATCAAAGGCG
GTGGAGGGTCCGGCGGTGGTGGCTCCGGACGGTCGCTGGTGGAGTCTGGGGGAGGCTTGGTCCAGCCTGGGGGGTCC
CTGAGACTCTCCTGTACTGCCTCTGGATTCACCATCAGTAGCTACCACATGCAGTGGGTCCGCCAGGCTCCAGGGAA
GGGGCTGGAGTACATCGGAACCATTAGTAGTGGTGGTAATGTATACTACGCAAGCTCCGCTAGAGGCAGATTCACCA
TCTCCAGACCCTCGTCCAAGAACACGGTGGATCTTCAAATGAACAGCCTGAGAGCCGAGGACACGGCTGTGTATTAC
TGTGCGAGAGACTCTGGTTATAGTGATCCTATGTGGGGCCAGGGAACCCTGGTCACCGTCTCTTCAGGCGGTGGCGG
TAGTGGGGGAGGCGGTTCTGGCGGCGGAGGGTCCGGCGGTGGAGGATCAGACGTTGTGATGACCCAGTCTCCATCTT
CCGTGTCTGCATCTGTAGGAGACAGAGTCACCATCACCTGTCAGGCCAGTCAGAACATTAGGACTTACTTATCCTGG
TATCAGCAGAAACCAGGGAAAGCCCCTAAGCTCCTGATCTATGCTGCAGCCAATCTGGCATCTGGGGTCCCATCAAG
GTTCAGCGGCAGTGGATCTGGGACAGATTTCACTCTCACCATCAGCGACCTGGAGCCTGGCGATGCTGCAACTTACT
ATTGTCAGTCTACCTATCTTGGTACTGATTATGTTGGCGGTGCTTTCGGCGGAGGGACCAAGGTGGAGATCAAA
>SEQ ID 50 SI-38P5 chain A aa
DVVMTQSPSTLSASVGDRVTINCQASESISSWLAWYQQKPGKAPKLLIYEASKLASGVPSRFSGSGSGTEFTLTISS
LQPDDFATYYCQGYFYFISRTYVNSFGGGTKVEIKGGGGSGGGGSGGGGSGGGGSEVQLVESGGGLVQPGGSLRLSC
AASGFTISTNAMSWVRQAPGKGLEWIGVITGRDITYYASWAKGRFTISRDNSKNTLYLQMNSLRAEDTAVYYCARDG
GSSAITSNNIWGQGTLVTVSTGGGGSGGGGSQVQLQQPGAELVKPGASVKMSCKASGYTFTSYNMHWVKQTPGRGLE
WIGAIYPGNGDTSYNQKFKGKATLTADKSSSTAYMQLSSLTSEDSAVYYCARSTYYGGDWYFNVWGAGTTVTVSAAS
TKGPSVFPLAPSSKSTSGGTAALGCLVKDYFPEPVTVSWNSGALTSGVHTFPAVLQSSGLYSLSSVVTVPSSSLGTQ
TYICNVNHKPSNTKVDKRVEPKSCDKTHTCPPCPAPEAAGAPSVFLFPPKPKDTLMISRTPEVTCVVVDVSHEDPEV
KFNWYVDGVEVHNAKTKPREEQYNSTYRVVSVLTVLHQDWLNGKEYKCAVSNKALPAPIEKTISKAKGQPREPQVYT
LPPSRDELTKNQVSLTCLVKGFYPSDIAVEWESNGQPENNYKTTPPVLDSDGSFFLYSKLTVDKSRWQQGNVFSCSV
MHEALHNHYTQKSLSLSPGGGGGSGGGGSEVQLLESGGGLVQPGGSLRLSCAASGFSFSSGYDMCWVRQAPGKGLEW
IACIAAGSAGITYDANWAKGRFTISRDNSKNTLYLQMNSLRAEDTAVYYCARSAFSFDYAMDLWGQGTLVTVSSGGG
GSGGGGSGGGGSGGGGSDIQMTQSPSTLSASVGDRVTITCQASQSISSHLNWYQQKPGKAPKLLIYKASTLASGVPS
RFSGSGSGTEFTLTISSLQPDDFATYYCQQGYSWGNVDNVFGGGTKVEIKGGGGSGGGGSGRSLVESGGGLVQPGGS
LRLSCTASGFTISSYHMQWVRQAPGKGLEYIGTISSGGNVYYASSARGRFTISRPSSKNTVDLQMNSLRAEDTAVYY
CARDSGYSDPMWGQGTLVTVSSGGGGSGGGGSGGGGSGGGGSDVVMTQSPSSVSASVGDRVTITCQASQNIRTYLSW
YQQKPGKAPKLLIYAAANLASGVPSRFSGSGSGTDFTLTISDLEPGDAATYYCQSTYLGTDYVGGAFGGGTKVEIK
>SEQ ID 51 SI-38P5 chain B nt
CAGATCGTGCTGAGCCAGAGCCCCGCCATCCTGAGCGCCAGCCCCGGCGAGAAGGTGACCATGACCTGCCGGGCCAG
CAGCAGCGTGAGCTACATCCACTGGTTCCAGCAGAAGCCCGGCAGCAGCCCCAAGCCCTGGATCTACGCCACCAGCA
ACCTGGCCAGCGGCGTGCCCGTGCGGTTCAGCGGCAGCGGCAGCGGCACCAGCTACAGCCTGACCATCAGCCGGGTG
GAGGCCGAGGACGCCGCCACCTACTACTGCCAGCAGTGGACCAGCAACCCCCCCACCTTCGGCGGCGGCACCAAGCT
GGAGATCAAGCGTACGGTGGCTGCACCATCTGTCTTCATCTTCCCGCCATCTGATGAGCAGTTGAAATCTGGAACTG
CCTCTGTTGTGTGCCTGCTGAATAACTTCTATCCCAGAGAGGCCAAAGTACAGTGGAAGGTGGATAACGCCCTCCAA
TCGGGTAACTCCCAGGAGAGTGTCACAGAGCAGGACAGCAAGGACAGCACCTACAGCCTCAGCAGCACCCTGACGCT
GAGCAAAGCAGACTACGAGAAACACAAAGTCTACGCCTGCGAAGTCACCCATCAGGGCCTGAGCTCGCCCGTCACAA
AGAGCTTCAACAGGGGAGAGTGTGGCGGTGGAGGGTCCGGCGGTGGTGGATCCGAGGTGCAGCTGGTGCAGTCTGGA
GCAGAGGTGAAGAAACCAGGAGAGTCTCTGAAGATCTCCTGTAAGGGTTCTGGATACAGCTTTAGCAGTTCATGGAT
CGGCTGGGTGCGCCAGGCACCTGGGAAAGGCCTGGAATGGATGGGGATCATCTATCCTGATGACTCTGATACCAGAT
ACAGTCCATCCTTCCAAGGCCAGGTCACCATCTCAGCCGACAAGTCCATCAGGACTGCCTACCTGCAGTGGAGTAGC
CTGAAGGCCTCGGACACCGCTATGTATTACTGTGCGAGACATGTTACTATGATTTGGGGAGTTATTATTGACTTCTG
GGGCCAGGGAACCCTGGTCACCGTCTCCTCAGGCGGTGGCGGTAGTGGGGGAGGCGGTTCTGGCGGCGGAGGGTCCG
GCGGTGGAGGATCAGCCATCCAGTTGACCCAGTCTCCATCCTCCCTGTCTGCATCTGTAGGAGACAGAGTCACCATC
ACTTGCCGGGCAAGTCAGGGCATTAGCAGTGCTTTAGCCTGGTATCAGCAGAAACCAGGGAAAGCTCCTAAGCTCCT
GATCTATGATGCCTCCAGTTTGGAAAGTGGGGTCCCATCAAGGTTCAGCGGCAGTGGATCTGGGACAGATTTCACTC
TCACCATCAGCAGCCTGCAGCCTGAAGATTTTGCAACTTATTACTGTCAACAGTTTAATAGTTACCCATTCACTTTC
GGCCCTGGGACCAAAGTGGATATCAAA
>SEQ ID 52 SI-38P5 chain B aa
QIVLSQSPAILSASPGEKVTMTCRASSSVSYIHWFQQKPGSSPKPWIYATSNLASGVPVRFSGSGSGTSYSLTISRV
EAEDAATYYCQQWTSNPPTFGGGTKLEIKRTVAAPSVFIFPPSDEQLKSGTASVVCLLNNFYPREAKVQWKVDNALQ
SGNSQESVTEQDSKDSTYSLSSTLTLSKADYEKHKVYACEVTHQGLSSPVTKSFNRGECGGGGSGGGGSEVQLVQSG
AEVKKPGESLKISCKGSGYSFSSSWIGWVRQAPGKGLEWMGIIYPDDSDTRYSPSFQGQVTISADKSIRTAYLQWSS
LKASDTAMYYCARHVTMIWGVIIDFWGQGTLVTVSSGGGGSGGGGSGGGGSGGGGSAIQLTQSPSSLSASVGDRVTI
TCRASQGISSALAWYQQKPGKAPKLLIYDASSLESGVPSRFSGSGSGTDFTLTISSLQPEDFATYYCQQFNSYPFTF
GPGTKVDIK
>SEQ ID 53 SI-38P6 chain A nt
GACGTCGTGATGACCCAGTCTCCTTCCACCCTGTCTGCATCTGTAGGAGACAGAGTCACCATCAATTGCCAAGCCAG
TGAGAGCATTAGCAGTTGGTTAGCCTGGTATCAGCAGAAACCAGGGAAAGCCCCTAAGCTCCTGATCTATGAAGCAT
CCAAACTGGCATCTGGGGTCCCATCAAGGTTCAGCGGCAGTGGATCTGGGACAGAATTTACTCTCACCATCAGCAGC
CTGCAGCCTGATGATTTTGCAACTTATTACTGCCAAGGCTATTTTTATTTTATTAGTCGTACTTATGTAAATTCTTT
CGGCTGTGGGACCAAGGTGGAGATCAAAGGTGGAGGCGGTTCAGGCGGAGGTGGAAGTGGTGGTGGCGGCTCTGGAG
GCGGCGGATCTGAGGTGCAGCTGGTGGAGTCTGGGGGAGGCTTGGTCCAGCCTGGGGGGTCCCTGAGACTCTCCTGT
GCAGCCTCTGGATTCACCATCAGTACCAATGCAATGAGCTGGGTCCGCCAGGCTCCAGGGAAGTGCCTGGAGTGGAT
CGGAGTCATTACTGGTCGTGATATCACATACTACGCGAGCTGGGCGAAAGGCAGATTCACCATCTCCAGAGACAATT
CCAAGAACACGCTGTATCTTCAAATGAACAGCCTGAGAGCCGAGGACACGGCTGTGTATTACTGTGCGAGAGACGGT
GGTTCTTCTGCTATTACTAGTAACAACATTTGGGGCCAGGGAACCCTGGTCACCGTGTCGACAGGCGGTGGAGGGTC
CGGCGGTGGTGGATCCCAGGTGCAGCTGCAGCAGCCCGGCGCCGAGCTGGTGAAGCCCGGCGCCAGCGTGAAGATGA
GCTGCAAGGCCAGCGGCTACACCTTCACCAGCTACAACATGCACTGGGTGAAGCAGACCCCCGGCCGGGGCCTGGAG
TGGATCGGCGCCATCTACCCCGGCAACGGCGACACCAGCTACAACCAGAAGTTCAAGGGCAAGGCCACCCTGACCGC
CGACAAGAGCAGCAGCACCGCCTACATGCAGCTGAGCAGCCTGACCAGCGAGGACAGCGCCGTGTACTACTGCGCCC
GGAGCACCTACTACGGCGGCGACTGGTACTTCAACGTGTGGGGCGCCGGCACCACCGTGACCGTGAGCGCCGCTAGC
ACCAAGGGCCCATCGGTCTTCCCCCTGGCACCCTCCTCCAAGAGCACCTCTGGGGGCACAGCGGCCCTGGGCTGCCT
GGTCAAGGACTACTTCCCCGAACCGGTGACGGTGTCGTGGAACTCAGGCGCCCTGACCAGCGGCGTGCACACCTTCC
CGGCTGTCCTACAGTCCTCAGGACTCTACTCCCTCAGCAGCGTGGTGACCGTGCCCTCCAGCAGCTTGGGCACCCAG
ACCTACATCTGCAACGTGAATCACAAGCCCAGCAACACCAAGGTGGACAAGAGAGTTGAGCCCAAATCTTGTGACAA
AACTCACACATGCCCACCGTGCCCAGCACCTGAAGCCGCGGGGGGACCGTCAGTCTTCCTCTTCCCCCCAAAACCCA
AGGACACCCTCATGATCTCCCGGACCCCTGAGGTCACATGCGTGGTGGTGGACGTGAGCCACGAAGACCCTGAGGTC
AAGTTCAACTGGTACGTGGACGGCGTGGAGGTGCATAATGCCAAGACAAAGCCGCGGGAGGAGCAGTACGCCAGCAC
GTACCGTGTGGTCAGCGTCCTCACCGTCCTGCACCAGGACTGGCTGAATGGCAAGGAGTACAAGTGCGCGGTCTCCA
ACAAAGCCCTCCCAGCCCCCATCGAGAAAACCATCTCCAAAGCCAAAGGGCAGCCCCGAGAACCACAGGTGTACACC
CTGCCCCCATCCCGGGATGAGCTGACCAAGAACCAGGTCAGCCTGACCTGCCTGGTCAAAGGCTTCTATCCCAGCGA
CATCGCCGTGGAGTGGGAGAGCAATGGGCAGCCGGAGAACAACTACAAGACCACGCCTCCCGTGCTGGACTCCGACG
GCTCCTTCTTCCTCTATAGCAAGCTCACCGTGGACAAGAGCAGGTGGCAGCAGGGGAACGTCTTCTCATGCTCCGTG
ATGCATGAGGCTCTGCACAACCACTACACGCAGAAGAGCCTCTCCCTGTCTCCGGGTGGCGGTGGAGGGTCCGGCGG
TGGTGGATCCGAGGTGCAGCTGTTGGAGTCTGGGGGAGGCTTGGTACAGCCTGGGGGGTCCCTGAGACTCTCCTGTG
CAGCCTCTGGATTCTCCTTCAGTAGCGGGTACGACATGTGCTGGGTCCGCCAGGCTCCAGGGAAGTGCCTGGAGTGG
ATCGCATGCATTGCTGCTGGTAGTGCTGGTATCACTTACGACGCGAACTGGGCGAAAGGCCGGTTCACCATCTCCAG
AGACAATTCCAAGAACACGCTGTATCTGCAAATGAACAGCCTGAGAGCCGAGGACACGGCCGTATATTACTGTGCGA
GATCGGCGTTTTCGTTCGACTACGCCATGGACCTCTGGGGCCAGGGAACCCTGGTCACCGTCTCGAGCGGTGGAGGC
GGTTCAGGCGGAGGTGGAAGTGGTGGTGGCGGCTCTGGAGGCGGCGGATCTGACATCCAGATGACCCAGTCTCCTTC
CACCCTGTCTGCATCTGTAGGAGACAGAGTCACCATCACTTGCCAGGCCAGTCAGAGCATTAGTTCCCACTTAAACT
GGTATCAGCAGAAACCAGGGAAAGCCCCTAAGCTCCTGATCTATAAGGCATCCACTCTGGCATCTGGGGTCCCATCA
AGGTTCAGCGGCAGTGGATCTGGGACAGAATTTACTCTCACCATCAGCAGCCTGCAGCCTGATGATTTTGCAACTTA
TTACTGCCAACAGGGTTATAGTTGGGGTAATGTTGATAATGTTTTCGGCTGCGGGACCAAGGTGGAGATCAAAGGTG
GTGGCGGCTCTGGAGGAGGAGGGTCCGGACGGTCGCTGGTGGAGTCTGGGGGAGGCTTGGTCCAGCCTGGGGGGTCC
CTGAGACTCTCCTGTACTGCCTCTGGATTCACCATCAGTAGCTACCACATGCAGTGGGTCCGGCAGGCACCTGGGAA
GTGCCTGGAGTACATCGGAACCATTAGTAGTGGTGGTAATGTATACTACGCAAGCTCCGCTAGAGGCAGATTCACCA
TCTCCAGACCCTCGTCCAAGAACACGGTGGATCTTCAAATGAACAGCCTGAGAGCCGAGGACACGGCTGTGTATTAC
TGTGCGAGAGACTCTGGTTATAGTGATCCTATGTGGGGCCAGGGAACCCTGGTCACCGTCTCTTCAGGCGGTGGCGG
TAGTGGGGGAGGCGGTTCTGGCGGCGGAGGGTCCGGCGGTGGAGGATCAGACGTTGTGATGACCCAGTCTCCATCTT
CCGTGTCTGCATCTGTAGGAGACAGAGTCACCATCACCTGTCAGGCCAGTCAGAACATTAGGACTTACTTATCCTGG
TATCAGCAGAAACCAGGGAAAGCCCCTAAGCTCCTGATCTATGCTGCAGCCAATCTGGCATCTGGGGTCCCATCAAG
GTTCAGCGGCAGTGGATCTGGGACAGATTTCACTCTCACCATCAGCGACTTGGAACCTGGCGATGCTGCAACTTACT
ATTGTCAGTCTACCTATCTTGGTACTGATTATGTTGGCGGTGCTTTCGGCTGTGGGACCAAGGTGGAGATCAAA
>SEQ ID 54 SI-38P6 chain A aa
DVVMTQSPSTLSASVGDRVTINCQASESISSWLAWYQQKPGKAPKLLIYEASKLASGVPSRFSGSGSGTEFTLTISS
LQPDDFATYYCQGYFYFISRTYVNSFGCGTKVEIKGGGGSGGGGSGGGGSGGGGSEVQLVESGGGLVQPGGSLRLSC
AASGFTISTNAMSWVRQAPGKCLEWIGVITGRDITYYASWAKGRFTISRDNSKNTLYLQMNSLRAEDTAVYYCARDG
GSSAITSNNIWGQGTLVTVSTGGGGSGGGGSQVQLQQPGAELVKPGASVKMSCKASGYTFTSYNMHWVKQTPGRGLE
WIGAIYPGNGDTSYNQKFKGKATLTADKSSSTAYMQLSSLTSEDSAVYYCARSTYYGGDWYFNVWGAGTTVTVSAAS
TKGPSVFPLAPSSKSTSGGTAALGCLVKDYFPEPVTVSWNSGALTSGVHTFPAVLQSSGLYSLSSVVTVPSSSLGTQ
TYICNVNHKPSNTKVDKRVEPKSCDKTHTCPPCPAPEAAGGPSVFLFPPKPKDTLMISRTPEVTCVVVDVSHEDPEV
KFNWYVDGVEVHNAKTKPREEQYASTYRvvSVLTVLHQDWLNGKEYKCAVSNKALPAPIEKTISKAKGQPREPQVYT
LPPSRDELTKNQVSLTCLVKGFYPSDIAVEWESNGQPENNYKTTPPVLDSDGSFFLYSKLTVDKSRWQQGNVFSCSV
MHEALHNHYTQKSLSLSPGGGGGSGGGGSEVQLLESGGGLVQPGGSLRLSCAASGFSFSSGYDMCWVRQAPGKCLEW
IACIAAGSAGITYDANWAKGRFTISRDNSKNTLYLQMNSLRAEDTAVYYCARSAFSFDYAMDLWGQGTLVTVSSGGG
GSGGGGSGGGGSGGGGSDIQMTQSPSTLSASVGDRVTITCQASQSISSHLNWYQQKPGKAPKLLIYKASTLASGVPS
RFSGSGSGTEFTLTISSLQPDDFATYYCQQGYSWGNVDNVFGCGTKVEIKGGGGSGGGGSGRSLVESGGGLVQPGGS
LRLSCTASGFTISSYHMQWVRQAPGKCLEYIGTISSGGNVYYASSARGRFTISRPSSKNTVDLQMNSLRAEDTAVYY
CARDSGYSDPMWGQGTLVTVSSGGGGSGGGGSGGGGSGGGGSDVVMTQSPSSVSASVGDRVTITCQASQNIRTYLSW
YQQKPGKAPKLLIYAAANLASGVPSRFSGSGSGTDFTLTISDLEPGDAATYYCQSTYLGTDYVGGAFGCGTKVEIK
>SEQ ID 55 SI-38P6 chain B nt
CAGATCGTGCTGAGCCAGAGCCCCGCCATCCTGAGCGCCAGCCCCGGCGAGAAGGTGACCATGACCTGCCGGGCCAG
CAGCAGCGTGAGCTACATCCACTGGTTCCAGCAGAAGCCCGGCAGCAGCCCCAAGCCCTGGATCTACGCCACCAGCA
ACCTGGCCAGCGGCGTGCCCGTGCGGTTCAGCGGCAGCGGCAGCGGCACCAGCTACAGCCTGACCATCAGCCGGGTG
GAGGCCGAGGACGCCGCCACCTACTACTGCCAGCAGTGGACCAGCAACCCCCCCACCTTCGGCGGCGGCACCAAGCT
GGAGATCAAGCGTACGGTGGCTGCACCATCTGTCTTCATCTTCCCGCCATCTGATGAGCAGTTGAAATCTGGAACTG
CCTCTGTTGTGTGCCTGCTGAATAACTTCTATCCCAGAGAGGCCAAAGTACAGTGGAAGGTGGATAACGCCCTCCAA
TCGGGTAACTCCCAGGAGAGTGTCACAGAGCAGGACAGCAAGGACAGCACCTACAGCCTCAGCAGCACCCTGACGCT
GAGCAAAGCAGACTACGAGAAACACAAAGTCTACGCCTGCGAAGTCACCCATCAGGGCCTGAGCTCGCCCGTCACAA
AGAGCTTCAACAGGGGAGAGTGTGGCGGTGGAGGGTCCGGCGGTGGTGGATCCGAGGTGCAGCTGGTGCAGTCTGGA
GCAGAGGTGAAGAAACCAGGAGAGTCTCTGAAGATCTCCTGTAAGGGTTCTGGATACAGCTTTAGCAGTTCATGGAT
CGGCTGGGTGCGCCAGGCACCTGGGAAATGTCTGGAATGGATGGGGATCATCTATCCTGATGACTCTGATACCAGAT
ACAGTCCATCCTTCCAAGGCCAGGTCACCATCTCAGCCGACAAGTCCATCAGGACTGCCTACCTGCAGTGGAGTAGC
CTGAAGGCCTCGGACACCGCTATGTATTACTGTGCGAGACATGTTACTATGATTTGGGGAGTTATTATTGACTTCTG
GGGCCAGGGAACCCTGGTCACCGTCTCCTCAGGCGGTGGCGGTAGTGGGGGAGGCGGTTCTGGCGGCGGAGGGTCCG
GCGGTGGAGGATCAGCCATCCAGTTGACCCAGTCTCCATCCTCCCTGTCTGCATCTGTAGGAGACAGAGTCACCATC
ACTTGCCGGGCAAGTCAGGGCATTAGCAGTGCTTTAGCCTGGTATCAGCAGAAACCAGGGAAAGCTCCTAAGCTCCT
GATCTATGATGCCTCCAGTTTGGAAAGTGGGGTCCCATCAAGGTTCAGCGGCAGTGGATCTGGGACAGATTTCACTC
TCACCATCAGCAGCCTGCAGCCTGAAGATTTTGCAACTTATTACTGTCAACAGTTTAATAGTTACCCATTCACTTTC
GGCTGTGGGACCAAAGTGGATATCAAA
>SEQ ID 56 SI-38P6 chain B aa
QIVLSQSPAILSASPGEKVTMTCRASSSVSYIHWFQQKPGSSPKPWIYATSNLASGVPVRFSGSGSGTSYSLTISRV
EAEDAATYYCQQWTSNPPTFGGGTKLEIKRTVAAPSVFIFPPSDEQLKSGTASVVCLLNNFYPREAKVQWKVDNALQ
SGNSQESVTEQDSKDSTYSLSSTLTLSKADYEKHKVYACEVTHQGLSSPVTKSFNRGECGGGGSGGGGSEVQLVQSG
AEVKKPGESLKISCKGSGYSFSSSWIGWVRQAPGKCLEWMGIIYPDDSDTRYSPSFQGQVTISADKSIRTAYLQWSS
LKASDTAMYYCARHVTMIWGVIIDFWGQGTLVTVSSGGGGSGGGGSGGGGSGGGGSAIQLTQSPSSLSASVGDRVTI
TCRASQGISSALAWYQQKPGKAPKLLIYDASSLESGVPSRFSGSGSGTDFTLTISSLQPEDFATYYCQQFNSYPFTF
GCGTKVDIK
>SEQ ID 57 SI-49P1 chain A nt
GAGATCGTGATGACCCAGAGCCCCAGCACCCTGAGCGCCAGCGTGGGCGACAGGGTGATCATCACCTGCCAGGCCAG
CGAGAGCATCAGCAGCTGGCTGGCCTGGTACCAGCAGAAGCCCGGCAAGGCCCCCAAGCTGCTGATCTACGAGGCCA
GCAAGCTGGCCAGCGGCGTGCCCAGCAGGTTCAGCGGCAGCGGCAGCGGCGCCGAGTTCACCCTGACCATCAGCAGC
CTGCAGCCCGACGACTTCGCCACCTACTACTGCCAGGGCTACTTCTACTTCATCAGCAGGACCTACGTGAACAGCTT
CGGCTGCGGCACCAAGCTGACCGTGCTGGGCGGTGGCGGTAGTGGGGGAGGCGGTTCTGGCGGCGGAGGGTCCGGCG
GTGGAGGATCAGAGGTGCAGCTGGTGGAGAGCGGCGGCGGCCTGGTGCAGCCCGGCGGCAGCCTGAGGCTGAGCTGC
ACCGCCAGCGGCTTCACCATCAGCACCAACGCCATGAGCTGGGTGAGGCAGGCCCCCGGCAAGTGCCTGGAGTGGGT
GGGCGTGATCACCGGCAGGGACATCACCTACTACGCCAGCTGGGCCAAGGGCAGGTTCACCATCAGCAGGGACACCA
GCAAGAACACCGTGTACCTGCAGATGAACAGCCTGAGGGCCGAGGACACCGCCGTGTACTACTGCGCCAGGGACGGC
GGCAGCAGCGCCATCACCAGCAACAACATCTGGGGCCAGGGCACCCTGGTGACCGTGTCGACAGGCGGTGGAGGGTC
CGGCGGTGGTGGATCACAGGTACAACTGCAGCAGTCTGGGCCTGAGCTGGAGAAGCCTGGCGCTTCAGTGAAGATAT
CCTGCAAGGCTTCTGGTTACTCATTCACTGGCTACACCATGAACTGGGTGAAGCAGAGCCATGGAAAGAGCCTTGAG
TGGATTGGACTTATTACTCCTTACAATGGTGCTTCTAGCTACAACCAGAAGTTCAGGGGCAAGGCCACATTAACTGT
AGACAAGTCATCCAGCACAGCCTACATGGACCTCCTCAGTCTGACATCTGAAGACTCTGCAGTCTATTTCTGTGCAA
GGGGGGGTTACGACGGGAGGGGTTTTGACTACTGGGGATCCGGGACCCCGGTCACCGTCTCCTCAGCTAGCACCAAG
GGCCCATCGGTCTTCCCCCTGGCACCCTCCTCCAAGAGCACCTCTGGGGGCACAGCGGCCCTGGGCTGCCTGGTCAA
GGACTACTTCCCCGAACCGGTGACGGTGTCGTGGAACTCAGGCGCCCTGACCAGCGGCGTGCACACCTTCCCGGCTG
TCCTACAGTCCTCAGGACTCTACTCCCTCAGCAGCGTGGTGACCGTGCCCTCCAGCAGCTTGGGCACCCAGACCTAC
ATCTGCAACGTGAATCACAAGCCCAGCAACACCAAGGTGGACAAGAGAGTTGAGCCCAAATCTTGTGACAAAACTCA
CACATGCCCACCGTGCCCAGCACCTGAAGCCGCGGGGGGACCGTCAGTCTTCCTCTTCCCCCCAAAACCCAAGGACA
CCCTCATGATCTCCCGGACCCCTGAGGTCACATGCGTGGTGGTGGACGTGAGCCACGAAGACCCTGAGGTCAAGTTC
AACTGGTACGTGGACGGCGTGGAGGTGCATAATGCCAAGACAAAGCCGCGGGAGGAGCAGTACGCCAGCACGTACCG
TGTGGTCAGCGTCCTCACCGTCCTGCACCAGGACTGGCTGAATGGCAAGGAGTACAAGTGCGCGGTCTCCAACAAAG
CCCTCCCAGCCCCCATCGAGAAAACCATCTCCAAAGCCAAAGGGCAGCCCCGAGAACCACAGGTGTACACCCTGCCC
CCATCCCGGGATGAGCTGACCAAGAACCAGGTCAGCCTGACCTGCCTGGTCAAAGGCTTCTATCCCAGCGACATCGC
CGTGGAGTGGGAGAGCAATGGGCAGCCGGAGAACAACTACAAGACCACGCCTCCCGTGCTGGACTCCGACGGCTCCT
TCTTCCTCTATAGCAAGCTCACCGTGGACAAGAGCAGGTGGCAGCAGGGGAACGTCTTCTCATGCTCCGTGATGCAT
GAGGCTCTGCACAACCACTACACGCAGAAGAGCCTCTCCCTGTCTCCGGGTGGCGGTGGAGGGTCCGGCGGTGGTGG
ATCCGAGGTGCAGCTGTTGGAGTCTGGGGGAGGCTTGGTACAGCCTGGGGGGTCCCTGAGACTCTCCTGTGCAGCCT
CTGGATTCTCCTTCAGTAGCGGGTACGACATGTGCTGGGTCCGCCAGGCTCCAGGGAAGTGCCTGGAGTGGATCGCA
TGCATTGCTGCTGGTAGTGCTGGTATCACTTACGACGCGAACTGGGCGAAAGGCCGGTTCACCATCTCCAGAGACAA
TTCCAAGAACACGCTGTATCTGCAAATGAACAGCCTGAGAGCCGAGGACACGGCCGTATATTACTGTGCGAGATCGG
CGTTTTCGTTCGACTACGCCATGGACCTCTGGGGCCAGGGAACCCTGGTCACCGTCTCGAGCGGTGGAGGCGGTTCA
GGCGGAGGTGGAAGTGGTGGTGGCGGCTCTGGAGGCGGCGGATCTGACATCCAGATGACCCAGTCTCCTTCCACCCT
GTCTGCATCTGTAGGAGACAGAGTCACCATCACTTGCCAGGCCAGTCAGAGCATTAGTTCCCACTTAAACTGGTATC
AGCAGAAACCAGGGAAAGCCCCTAAGCTCCTGATCTATAAGGCATCCACTCTGGCATCTGGGGTCCCATCAAGGTTC
AGCGGCAGTGGATCTGGGACAGAATTTACTCTCACCATCAGCAGCCTGCAGCCTGATGATTTTGCAACTTATTACTG
CCAACAGGGTTATAGTTGGGGTAATGTTGATAATGTTTTCGGCTGCGGGACCAAGGTGGAGATCAAAGGTGGTGGCG
GCTCTGGAGGAGGAGGGTCCGGACGGTCGCTGGTGGAGTCTGGGGGAGGCTTGGTCCAGCCTGGGGGGTCCCTGAGA
CTCTCCTGTACTGCCTCTGGATTCACCATCAGTAGCTACCACATGCAGTGGGTCCGGCAGGCACCTGGGAAGTGCCT
GGAGTACATCGGAACCATTAGTAGTGGTGGTAATGTATACTACGCAAGCTCCGCTAGAGGCAGATTCACCATCTCCA
GACCCTCGTCCAAGAACACGGTGGATCTTCAAATGAACAGCCTGAGAGCCGAGGACACGGCTGTGTATTACTGTGCG
AGAGACTCTGGTTATAGTGATCCTATGTGGGGCCAGGGAACCCTGGTCACCGTCTCTTCAGGCGGTGGCGGTAGTGG
GGGAGGCGGTTCTGGCGGCGGAGGGTCCGGCGGTGGAGGATCAGACGTTGTGATGACCCAGTCTCCATCTTCCGTGT
CTGCATCTGTAGGAGACAGAGTCACCATCACCTGTCAGGCCAGTCAGAACATTAGGACTTACTTATCCTGGTATCAG
CAGAAACCAGGGAAAGCCCCTAAGCTCCTGATCTATGCTGCAGCCAATCTGGCATCTGGGGTCCCATCAAGGTTCAG
CGGCAGTGGATCTGGGACAGATTTCACTCTCACCATCAGCGACTTGGAACCTGGCGATGCTGCAACTTACTATTGTC
AGTCTACCTATCTTGGTACTGATTATGTTGGCGGTGCTTTCGGCTGTGGGACCAAGGTGGAGATCAAATGA
>SEQ ID 58 SI-49P1 chain A aa
EIVMTQSPSTLSASVGDRVIITCQASESISSWLAWYQQKPGKAPKLLIYEASKLASGVPSRFSGSGSGAEFTLTISS
LQPDDFATYYCQGYFYFISRTYVNSFGCGTKLTVLGGGGSGGGGSGGGGSGGGGSEVQLVESGGGLVQPGGSLRLSC
TASGFTISTNAMSWVRQAPGKCLEWVGVITGRDITYYASWAKGRFTISRDTSKNTVYLQMNSLRAEDTAVYYCARDG
GSSAITSNNIWGQGTLVTVSTGGGGSGGGGSQVQLQQSGPELEKPGASVKISCKASGYSFTGYTMNWVKQSHGKSLE
WIGLITPYNGASSYNQKFRGKATLTVDKSSSTAYMDLLSLTSEDSAVYFCARGGYDGRGFDYWGSGTPVTVSSASTK
GPSVFPLAPSSKSTSGGTAALGCLVKDYFPEPVTVSWNSGALTSGVHTFPAVLQSSGLYSLSSVVTVPSSSLGTQTY
ICNVNHKPSNTKVDKRVEPKSCDKTHTCPPCPAPEAAGGPSVFLFPPKPKDTLMISRTPEVTCVVVDVSHEDPEVKF
NWYVDGVEVHNAKTKPREEQYASTYRVVSVLTVLHQDWLNGKEYKCAVSNKALPAPIEKTISKAKGQPREPQVYTLP
PSRDELTKNQVSLTCLVKGFYPSDIAVEWESNGQPENNYKTTPPVLDSDGSFFLYSKLTVDKSRWQQGNVFSCSVMH
EALHNHYTQKSLSLSPGGGGGSGGGGSEVQLLESGGGLVQPGGSLRLSCAASGFSFSSGYDMCWVRQAPGKCLEWIA
CIAAGSAGITYDANWAKGRFTISRDNSKNTLYLQMNSLRAEDTAVYYCARSAFSFDYAMDLWGQGTLVTVSSGGGGS
GGGGSGGGGSGGGGSDIQMTQSPSTLSASVGDRVTITCQASQSISSHLNWYQQKPGKAPKLLIYKASTLASGVPSRF
SGSGSGTEFTLTISSLQPDDFATYYCQQGYSWGNVDNVFGCGTKVEIKGGGGSGGGGSGRSLVESGGGLVQPGGSLR
LSCTASGFTISSYHMQWVRQAPGKCLEYIGTISSGGNVYYASSARGRFTISRPSSKNTVDLQMNSLRAEDTAVYYCA
RDSGYSDPMWGQGTLVTVSSGGGGSGGGGSGGGGSGGGGSDVVMTQSPSSVSASVGDRVTITCQASQNIRTYLSWYQ
QKPGKAPKLLIYAAANLASGVPSRFSGSGSGTDFTLTISDLEPGDAATYYCQSTYLGTDYVGGAFGCGTKVEIK
>SEQ ID 59 SI-49P1 chain B nt
GACATCGAGCTCACTCAGTCTCCAGCAATCATGTCTGCATCTCCAGGGGAGAAGGTCACCATGACCTGCAGTGCCAG
CTCAAGTGTAAGTTACATGCACTGGTACCAGCAGAAGTCAGGCACCTCCCCCAAAAGATGGATTTATGACACATCCA
AACTGGCTTCTGGAGTCCCAGGTCGCTTCAGTGGCAGTGGGTCTGGAAACTCTTACTCTCTCACAATCAGCAGCGTG
GAGGCTGAAGATGATGCAACTTATTACTGCCAGCAGTGGAGTAAGCACCCTCTCACGTTCGGATCCGGGACCAAGGT
GGAAATCAAACGTACGGTGGCTGCACCATCTGTCTTCATCTTCCCGCCATCTGATGAGCAGTTGAAATCTGGAACTG
CCTCTGTTGTGTGCCTGCTGAATAACTTCTATCCCAGAGAGGCCAAAGTACAGTGGAAGGTGGATAACGCCCTCCAA
TCGGGTAACTCCCAGGAGAGTGTCACAGAGCAGGACAGCAAGGACAGCACCTACAGCCTCAGCAGCACCCTGACGCT
GAGCAAAGCAGACTACGAGAAACACAAAGTCTACGCCTGCGAAGTCACCCATCAGGGCCTGAGCTCGCCCGTCACAA
AGAGCTTCAACAGGGGAGAGTGTGGCGGTGGAGGGTCCGGCGGTGGTGGATCCTTTCTTAATTCCCTTTTCAACCAA
GAGGTTCAGATCCCCTTGACTGAAAGCTATTGCGGCCCTTGTCCGAAAAACTGGATATGTTACAAGAATAATTGTTA
CCAATTCTTCGACGAAAGCAAGAACTGGTATGAGAGTCAGGCGTCTTGTATGAGTCAGAATGCCAGCCTGCTTAAGG
TTTATTCAAAAGAAGACCAGGATCTGCTTAAGTTGGTAAAGAGCTACCACTGGATGGGGCTGGTACATATCCCAACG
AATGGGTCATGGCAGTGGGAGGACGGTTCTATTCTGAGTCCAAATCTCCTGACGATCATCGAAATGCAGAAAGGGGA
CTGTGCCCTGTATGCATCATCCTTCAAGGGGTACATCGAGAACTGCAGTACCCCAAATACCTACATTTGTATGCAAA
GAACGGTTGGAGGCGGTGGCTCAGGCGGAGGCGGCTCAGGAGGTGGCGGTTCAGGAGGCGGCGGATCTTTCCTAAAC
TCATTATTCAACCAAGAAGTTCAAATTCCCTTGACCGAAAGTTACTGTGGCCCATGTCCTAAAAACTGGATATGTTA
CAAAAATAACTGCTACCAATTTTTTGATGAGAGTAAAAACTGGTATGAGAGCCAGGCTTCTTGTATGTCTCAAAATG
CCAGCCTTCTGAAAGTATACAGCAAAGAGGACCAGGATTTACTTAAACTGGTGAAGTCATATCATTGGATGGGACTA
GTACACATTCCAACAAATGGATCTTGGCAGTGGGAAGATGGCTCCATTCTCTCACCCAACCTACTAACAATAATTGA
AATGCAGAAGGGAGACTGTGCACTCTATGCCTCGAGCTTTAAAGGCTATATAGAAAACTGTTCAACTCCAAATACGT
ACATCTGCATGCAAAGGACTGTGTAG
>SEQ ID 60 SI-49P1 chain B aa
DIELTQSPAIMSASPGEKVTMTCSASSSVSYMHWYQQKSGTSPKRWIYDTSKLASGVPGRFSGSGSGNSYSLTISSV
EAEDDATYYCQQWSKHPLTFGSGTKVEIKRTVAAPSVFIFPPSDEQLKSGTASVVCLLNNFYPREAKVQWKVDNALQ
SGNSQESVTEQDSKDSTYSLSSTLTLSKADYEKHKVYACEVTHQGLSSPVTKSFNRGECGGGGSGGGGSFLNSLFNQ
EVQIPLTESYCGPCPKNWICYKNNCYQFFDESKNWYESQASCMSQNASLLKVYSKEDQDLLKLVKSYHWMGLVHIPT
NGSWQWEDGSILSPNLLTIIEMQKGDCALYASSFKGYIENCSTPNTYICMQRTVGGGGSGGGGSGGGGSGGGGSFLN
SLFNQEVQIPLTESYCGPCPKNWICYKNNCYQFFDESKNWYESQASCMSQNASLLKVYSKEDQDLLKLVKSYHWMGL
VHIPTNGSWQWEDGSILSPNLLTIIEMQKGDCALYASSFKGYIENCSTPNTYICMQRTV
>SEQ ID 61 SI-49P2 chain A nt
GAGATCGTGATGACCCAGAGCCCCAGCACCCTGAGCGCCAGCGTGGGCGACAGGGTGATCATCACCTGCCAGGCCAG
CGAGAGCATCAGCAGCTGGCTGGCCTGGTACCAGCAGAAGCCCGGCAAGGCCCCCAAGCTGCTGATCTACGAGGCCA
GCAAGCTGGCCAGCGGCGTGCCCAGCAGGTTCAGCGGCAGCGGCAGCGGCGCCGAGTTCACCCTGACCATCAGCAGC
CTGCAGCCCGACGACTTCGCCACCTACTACTGCCAGGGCTACTTCTACTTCATCAGCAGGACCTACGTGAACAGCTT
CGGCTGCGGCACCAAGCTGACCGTGCTGGGCGGTGGCGGTAGTGGGGGAGGCGGTTCTGGCGGCGGAGGGTCCGGCG
GTGGAGGATCAGAGGTGCAGCTGGTGGAGAGCGGCGGCGGCCTGGTGCAGCCCGGCGGCAGCCTGAGGCTGAGCTGC
ACCGCCAGCGGCTTCACCATCAGCACCAACGCCATGAGCTGGGTGAGGCAGGCCCCCGGCAAGTGCCTGGAGTGGGT
GGGCGTGATCACCGGCAGGGACATCACCTACTACGCCAGCTGGGCCAAGGGCAGGTTCACCATCAGCAGGGACACCA
GCAAGAACACCGTGTACCTGCAGATGAACAGCCTGAGGGCCGAGGACACCGCCGTGTACTACTGCGCCAGGGACGGC
GGCAGCAGCGCCATCACCAGCAACAACATCTGGGGCCAGGGCACCCTGGTGACCGTGTCGACAGGCGGTGGAGGGTC
CGGCGGTGGTGGATCACAGGTCCAACTGCAGCAGCCTGGGGCTGAGCTGGTGAGGCCTGGGGCTTCAGTGAAGCTGT
CCTGCAAGGCTTCTGGCTACACCTTCACCAGCTACTGGATAAACTGGGTGAAGCAGAGGCCTGGACAAGGCCTTGAG
TGGATCGGAAATATTTATCCTTCTGATAGTTATACTAACTACAATCAAAAGTTCAAGGACAAGGCCACATTGACTGT
AGACAAATCCTCCAGCACAGCCTACATGCAGCTCAGCAGCCCGACATCTGAGGACTCTGCGGTCTATTACTGTACAA
GATCGTGGAGGGGTAACTCCTTTGACTACTGGGGCCAAGGCACCACTCTCACAGTCTCCTCAGCTAGCACCAAGGGC
CCATCGGTCTTCCCCCTGGCACCCTCCTCCAAGAGCACCTCTGGGGGCACAGCGGCCCTGGGCTGCCTGGTCAAGGA
CTACTTCCCCGAACCGGTGACGGTGTCGTGGAACTCAGGCGCCCTGACCAGCGGCGTGCACACCTTCCCGGCTGTCC
TACAGTCCTCAGGACTCTACTCCCTCAGCAGCGTGGTGACCGTGCCCTCCAGCAGCTTGGGCACCCAGACCTACATC
TGCAACGTGAATCACAAGCCCAGCAACACCAAGGTGGACAAGAGAGTTGAGCCCAAATCTTGTGACAAAACTCACAC
ATGCCCACCGTGCCCAGCACCTGAAGCCGCGGGGGGACCGTCAGTCTTCCTCTTCCCCCCAAAACCCAAGGACACCC
TCATGATCTCCCGGACCCCTGAGGTCACATGCGTGGTGGTGGACGTGAGCCACGAAGACCCTGAGGTCAAGTTCAAC
TGGTACGTGGACGGCGTGGAGGTGCATAATGCCAAGACAAAGCCGCGGGAGGAGCAGTACGCCAGCACGTACCGTGT
GGTCAGCGTCCTCACCGTCCTGCACCAGGACTGGCTGAATGGCAAGGAGTACAAGTGCGCGGTCTCCAACAAAGCCC
TCCCAGCCCCCATCGAGAAAACCATCTCCAAAGCCAAAGGGCAGCCCCGAGAACCACAGGTGTACACCCTGCCCCCA
TCCCGGGATGAGCTGACCAAGAACCAGGTCAGCCTGACCTGCCTGGTCAAAGGCTTCTATCCCAGCGACATCGCCGT
GGAGTGGGAGAGCAATGGGCAGCCGGAGAACAACTACAAGACCACGCCTCCCGTGCTGGACTCCGACGGCTCCTTCT
TCCTCTATAGCAAGCTCACCGTGGACAAGAGCAGGTGGCAGCAGGGGAACGTCTTCTCATGCTCCGTGATGCATGAG
GCTCTGCACAACCACTACACGCAGAAGAGCCTCTCCCTGTCTCCGGGTGGCGGTGGAGGGTCCGGCGGTGGTGGATC
CGAGGTGCAGCTGTTGGAGTCTGGGGGAGGCTTGGTACAGCCTGGGGGGTCCCTGAGACTCTCCTGTGCAGCCTCTG
GATTCTCCTTCAGTAGCGGGTACGACATGTGCTGGGTCCGCCAGGCTCCAGGGAAGTGCCTGGAGTGGATCGCATGC
ATTGCTGCTGGTAGTGCTGGTATCACTTACGACGCGAACTGGGCGAAAGGCCGGTTCACCATCTCCAGAGACAATTC
CAAGAACACGCTGTATCTGCAAATGAACAGCCTGAGAGCCGAGGACACGGCCGTATATTACTGTGCGAGATCGGCGT
TTTCGTTCGACTACGCCATGGACCTCTGGGGCCAGGGAACCCTGGTCACCGTCTCGAGCGGTGGAGGCGGTTCAGGC
GGAGGTGGAAGTGGTGGTGGCGGCTCTGGAGGCGGCGGATCTGACATCCAGATGACCCAGTCTCCTTCCACCCTGTC
TGCATCTGTAGGAGACAGAGTCACCATCACTTGCCAGGCCAGTCAGAGCATTAGTTCCCACTTAAACTGGTATCAGC
AGAAACCAGGGAAAGCCCCTAAGCTCCTGATCTATAAGGCATCCACTCTGGCATCTGGGGTCCCATCAAGGTTCAGC
GGCAGTGGATCTGGGACAGAATTTACTCTCACCATCAGCAGCCTGCAGCCTGATGATTTTGCAACTTATTACTGCCA
ACAGGGTTATAGTTGGGGTAATGTTGATAATGTTTTCGGCTGCGGGACCAAGGTGGAGATCAAAGGTGGTGGCGGCT
CTGGAGGAGGAGGGTCCGGACGGTCGCTGGTGGAGTCTGGGGGAGGCTTGGTCCAGCCTGGGGGGTCCCTGAGACTC
TCCTGTACTGCCTCTGGATTCACCATCAGTAGCTACCACATGCAGTGGGTCCGGCAGGCACCTGGGAAGTGCCTGGA
GTACATCGGAACCATTAGTAGTGGTGGTAATGTATACTACGCAAGCTCCGCTAGAGGCAGATTCACCATCTCCAGAC
CCTCGTCCAAGAACACGGTGGATCTTCAAATGAACAGCCTGAGAGCCGAGGACACGGCTGTGTATTACTGTGCGAGA
GACTCTGGTTATAGTGATCCTATGTGGGGCCAGGGAACCCTGGTCACCGTCTCTTCAGGCGGTGGCGGTAGTGGGGG
AGGCGGTTCTGGCGGCGGAGGGTCCGGCGGTGGAGGATCAGACGTTGTGATGACCCAGTCTCCATCTTCCGTGTCTG
CATCTGTAGGAGACAGAGTCACCATCACCTGTCAGGCCAGTCAGAACATTAGGACTTACTTATCCTGGTATCAGCAG
AAACCAGGGAAAGCCCCTAAGCTCCTGATCTATGCTGCAGCCAATCTGGCATCTGGGGTCCCATCAAGGTTCAGCGG
CAGTGGATCTGGGACAGATTTCACTCTCACCATCAGCGACTTGGAACCTGGCGATGCTGCAACTTACTATTGTCAGT
CTACCTATCTTGGTACTGATTATGTTGGCGGTGCTTTCGGCTGTGGGACCAAGGTGGAGATCAAATGA
>SEQ ID 62 SI-49P2 chain A aa
EIVMTQSPSTLSASVGDRVIITCQASESISSWLAWYQQKPGKAPKLLIYEASKLASGVPSRFSGSGSGAEFTLTISS
LQPDDFATYYCQGYFYFISRTYVNSFGCGTKLTVLGGGGSGGGGSGGGGSGGGGSEVQLVESGGGLVQPGGSLRLSC
TASGFTISTNAMSWVRQAPGKCLEWVGVITGRDITYYASWAKGRFTISRDTSKNTVYLQMNSLRAEDTAVYYCARDG
GSSAITSNNIWGQGTLVTVSTGGGGSGGGGSQVQLQQPGAELVRPGASVKLSCKASGYTFTSYWINWVKQRPGQGLE
WIGNIYPSDSYTNYNQKFKDKATLTVDKSSSTAYMQLSSPTSEDSAVYYCTRSWRGNSFDYWGQGTTLTVSSASTKG
PSVFPLAPSSKSTSGGTAALGCLVKDYFPEPVTVSWNSGALTSGVHTFPAVLQSSGLYSLSSVVTVPSSSLGTQTYI
CNVNHKPSNTKVDKRVEPKSCDKTHTCPPCPAPEAAGGPSVFLFPPKPKDTLMISRTPEVTCVVVDVSHEDPEVKFN
WYVDGVEVHNAKTKPREEQYASTYRVVSVLTVLHQDWLNGKEYKCAVSNKALPAPIEKTISKAKGQPREPQVYTLPP
SRDELTKNQVSLTCLVKGFYPSDIAVEWESNGQPENNYKTTPPVLDSDGSFFLYSKLTVDKSRWQQGNVFSCSVMHE
ALHNHYTQKSLSLSPGGGGGSGGGGSEVQLLESGGGLVQPGGSLRLSCAASGFSFSSGYDMCWVRQAPGKCLEWIAC
IAAGSAGITYDANWAKGRFTISRDNSKNTLYLQMNSLRAEDTAVYYCARSAFSFDYAMDLWGQGTLVTVSSGGGGSG
GGGSGGGGSGGGGSDIQMTQSPSTLSASVGDRVTITCQASQSISSHLNWYQQKPGKAPKLLIYKASTLASGVPSRFS
GSGSGTEFTLTISSLQPDDFATYYCQQGYSWGNVDNVFGCGTKVEIKGGGGSGGGGSGRSLVESGGGLVQPGGSLRL
SCTASGFTISSYHMQWVRQAPGKCLEYIGTISSGGNVYYASSARGRFTISRPSSKNTVDLQMNSLRAEDTAVYYCAR
DSGYSDPMWGQGTLVTVSSGGGGSGGGGSGGGGSGGGGSDVVMTQSPSSVSASVGDRVTITCQASQNIRTYLSWYQQ
KPGKAPKLLIYAAANLASGVPSRFSGSGSGTDFTLTISDLEPGDAATYYCQSTYLGTDYVGGAFGCGTKVEIK
>SEQ ID 63 SI-49P2 chain B nt
GACATTGTGATGACACAGTCTCCATCCTCCCTGACTGTGACAGCAGGAGAGAAGGTCACTATGAGCTGCAAGTCCAG
TCAGAGTCTGTTAAACAGTGGAAATCAAAAGAACTACTTGACCTGGTACCAGCAGAAACCAGGGCAGCCTCCTAAAC
TGTTGATCTACTGGGCATCCACTAGGGAATCTGGGGTCCCTGATCGCTTCACAGGCAGTGGATCTGGAACAGATTTC
ACTCTCACCATCAGCAGTGTGCAGGCTGAAGACCTGGCAGTTTATTACTGTCAGAATGATTATAGTTATCCATTCAC
GTTCGGCTCGGGGACAAAGTTGGAAATAAAACGTACGGTGGCTGCACCATCTGTCTTCATCTTCCCGCCATCTGATG
AGCAGTTGAAATCTGGAACTGCCTCTGTTGTGTGCCTGCTGAATAACTTCTATCCCAGAGAGGCCAAAGTACAGTGG
AAGGTGGATAACGCCCTCCAATCGGGTAACTCCCAGGAGAGTGTCACAGAGCAGGACAGCAAGGACAGCACCTACAG
CCTCAGCAGCACCCTGACGCTGAGCAAAGCAGACTACGAGAAACACAAAGTCTACGCCTGCGAAGTCACCCATCAGG
GCCTGAGCTCGCCCGTCACAAAGAGCTTCAACAGGGGAGAGTGTGGCGGTGGAGGGTCCGGCGGTGGTGGATCCTTT
CTTAATTCCCTTTTCAACCAAGAGGTTCAGATCCCCTTGACTGAAAGCTATTGCGGCCCTTGTCCGAAAAACTGGAT
ATGTTACAAGAATAATTGTTACCAATTCTTCGACGAAAGCAAGAACTGGTATGAGAGTCAGGCGTCTTGTATGAGTC
AGAATGCCAGCCTGCTTAAGGTTTATTCAAAAGAAGACCAGGATCTGCTTAAGTTGGTAAAGAGCTACCACTGGATG
GGGCTGGTACATATCCCAACGAATGGGTCATGGCAGTGGGAGGACGGTTCTATTCTGAGTCCAAATCTCCTGACGAT
CATCGAAATGCAGAAAGGGGACTGTGCCCTGTATGCATCATCCTTCAAGGGGTACATCGAGAACTGCAGTACCCCAA
ATACCTACATTTGTATGCAAAGAACGGTTGGAGGCGGTGGCTCAGGCGGAGGCGGCTCAGGAGGTGGCGGTTCAGGA
GGCGGCGGATCTTTCCTAAACTCATTATTCAACCAAGAAGTTCAAATTCCCTTGACCGAAAGTTACTGTGGCCCATG
TCCTAAAAACTGGATATGTTACAAAAATAACTGCTACCAATTTTTTGATGAGAGTAAAAACTGGTATGAGAGCCAGG
CTTCTTGTATGTCTCAAAATGCCAGCCTTCTGAAAGTATACAGCAAAGAGGACCAGGATTTACTTAAACTGGTGAAG
TCATATCATTGGATGGGACTAGTACACATTCCAACAAATGGATCTTGGCAGTGGGAAGATGGCTCCATTCTCTCACC
CAACCTACTAACAATAATTGAAATGCAGAAGGGAGACTGTGCACTCTATGCCTCGAGCTTTAAAGGCTATATAGAAA
ACTGTTCAACTCCAAATACGTACATCTGCATGCAAAGGACTGTGTAG
>SEQ ID 64 SI-49P2 chain B aa
DIVMTQSPSSLTVTAGEKVTMSCKSSQSLLNSGNQKNYLTWYQQKPGQPPKLLIYWASTRESGVPDRFTGSGSGTDF
TLTISSVQAEDLAVYYCQNDYSYPFTFGSGTKLEIKRTVAAPSVFIFPPSDEQLKSGTASVVCLLNNFYPREAKVQW
KVDNALQSGNSQESVTEQDSKDSTYSLSSTLTLSKADYEKHKVYACEVTHQGLSSPVTKSFNRGECGGGGSGGGGSF
LNSLFNQEVQIPLTESYCGPCPKNWICYKNNCYQFFDESKNWYESQASCMSQNASLLKVYSKEDQDLLKLVKSYHWM
GLVHIPTNGSWQWEDGSILSPNLLTIIEMQKGDCALYASSFKGYIENCSTPNTYICMQRTVGGGGSGGGGSGGGGSG
GGGSFLNSLFNQEVQIPLTESYCGPCPKNWICYKNNCYQFFDESKNWYESQASCMSQNASLLKVYSKEDQDLLKLVK
SYHWMGLVHIPTNGSWQWEDGSILSPNLLTIIEMQKGDCALYASSFKGYIENCSTPNTYICMQRT
>SEQ ID 65 SI-49P3 chain A nt
GAGATCGTGATGACCCAGAGCCCCAGCACCCTGAGCGCCAGCGTGGGCGACAGGGTGATCATCACCTGCCAGGCCAG
CGAGAGCATCAGCAGCTGGCTGGCCTGGTACCAGCAGAAGCCCGGCAAGGCCCCCAAGCTGCTGATCTACGAGGCCA
GCAAGCTGGCCAGCGGCGTGCCCAGCAGGTTCAGCGGCAGCGGCAGCGGCGCCGAGTTCACCCTGACCATCAGCAGC
CTGCAGCCCGACGACTTCGCCACCTACTACTGCCAGGGCTACTTCTACTTCATCAGCAGGACCTACGTGAACAGCTT
CGGCTGCGGCACCAAGCTGACCGTGCTGGGCGGTGGCGGTAGTGGGGGAGGCGGTTCTGGCGGCGGAGGGTCCGGCG
GTGGAGGATCAGAGGTGCAGCTGGTGGAGAGCGGCGGCGGCCTGGTGCAGCCCGGCGGCAGCCTGAGGCTGAGCTGC
ACCGCCAGCGGCTTCACCATCAGCACCAACGCCATGAGCTGGGTGAGGCAGGCCCCCGGCAAGTGCCTGGAGTGGGT
GGGCGTGATCACCGGCAGGGACATCACCTACTACGCCAGCTGGGCCAAGGGCAGGTTCACCATCAGCAGGGACACCA
GCAAGAACACCGTGTACCTGCAGATGAACAGCCTGAGGGCCGAGGACACCGCCGTGTACTACTGCGCCAGGGACGGC
GGCAGCAGCGCCATCACCAGCAACAACATCTGGGGCCAGGGCACCCTGGTGACCGTGTCGACAGGCGGTGGAGGGTC
CGGCGGTGGTGGATCAGAGGTTCAGCTGGTGGAGTCTGGCGGTGGCCTGGTGCAGCCAGGGGGCTCACTCCGTTTGT
CCTGTGCAGCTTCTGGCTTCAACATTAAAGACACCTATATACACTGGGTGCGTCAGGCCCCGGGTAAGGGCCTGGAA
TGGGTTGCAAGGATTTATCCTACGAATGGTTATACTAGATATGCCGATAGCGTCAAGGGCCGTTTCACTATAAGCGC
AGACACATCCAAAAACACAGCCTACCTGCAGATGAACAGCCTGCGTGCTGAGGACACTGCCGTCTATTATTGTTCTA
GATGGGGAGGGGACGGCTTCTATGCTATGGACTACTGGGGTCAAGGAACCCTGGTCACCGTCTCCTCGGCTAGCACC
AAGGGCCCATCGGTCTTCCCCCTGGCACCCTCCTCCAAGAGCACCTCTGGGGGCACAGCGGCCCTGGGCTGCCTGGT
CAAGGACTACTTCCCCGAACCGGTGACGGTGTCGTGGAACTCAGGCGCCCTGACCAGCGGCGTGCACACCTTCCCGG
CTGTCCTACAGTCCTCAGGACTCTACTCCCTCAGCAGCGTGGTGACCGTGCCCTCCAGCAGCTTGGGCACCCAGACC
TACATCTGCAACGTGAATCACAAGCCCAGCAACACCAAGGTGGACAAGAGAGTTGAGCCCAAATCTTGTGACAAAAC
TCACACATGCCCACCGTGCCCAGCACCTGAAGCCGCGGGGGGACCGTCAGTCTTCCTCTTCCCCCCAAAACCCAAGG
ACACCCTCATGATCTCCCGGACCCCTGAGGTCACATGCGTGGTGGTGGACGTGAGCCACGAAGACCCTGAGGTCAAG
TTCAACTGGTACGTGGACGGCGTGGAGGTGCATAATGCCAAGACAAAGCCGCGGGAGGAGCAGTACGCCAGCACGTA
CCGTGTGGTCAGCGTCCTCACCGTCCTGCACCAGGACTGGCTGAATGGCAAGGAGTACAAGTGCGCGGTCTCCAACA
AAGCCCTCCCAGCCCCCATCGAGAAAACCATCTCCAAAGCCAAAGGGCAGCCCCGAGAACCACAGGTGTACACCCTG
CCCCCATCCCGGGATGAGCTGACCAAGAACCAGGTCAGCCTGACCTGCCTGGTCAAAGGCTTCTATCCCAGCGACAT
CGCCGTGGAGTGGGAGAGCAATGGGCAGCCGGAGAACAACTACAAGACCACGCCTCCCGTGCTGGACTCCGACGGCT
CCTTCTTCCTCTATAGCAAGCTCACCGTGGACAAGAGCAGGTGGCAGCAGGGGAACGTCTTCTCATGCTCCGTGATG
CATGAGGCTCTGCACAACCACTACACGCAGAAGAGCCTCTCCCTGTCTCCGGGTGGCGGTGGAGGGTCCGGCGGTGG
TGGATCCGAGGTGCAGCTGTTGGAGTCTGGGGGAGGCTTGGTACAGCCTGGGGGGTCCCTGAGACTCTCCTGTGCAG
CCTCTGGATTCTCCTTCAGTAGCGGGTACGACATGTGCTGGGTCCGCCAGGCTCCAGGGAAGTGCCTGGAGTGGATC
GCATGCATTGCTGCTGGTAGTGCTGGTATCACTTACGACGCGAACTGGGCGAAAGGCCGGTTCACCATCTCCAGAGA
CAATTCCAAGAACACGCTGTATCTGCAAATGAACAGCCTGAGAGCCGAGGACACGGCCGTATATTACTGTGCGAGAT
CGGCGTTTTCGTTCGACTACGCCATGGACCTCTGGGGCCAGGGAACCCTGGTCACCGTCTCGAGCGGTGGAGGCGGT
TCAGGCGGAGGTGGAAGTGGTGGTGGCGGCTCTGGAGGCGGCGGATCTGACATCCAGATGACCCAGTCTCCTTCCAC
CCTGTCTGCATCTGTAGGAGACAGAGTCACCATCACTTGCCAGGCCAGTCAGAGCATTAGTTCCCACTTAAACTGGT
ATCAGCAGAAACCAGGGAAAGCCCCTAAGCTCCTGATCTATAAGGCATCCACTCTGGCATCTGGGGTCCCATCAAGG
TTCAGCGGCAGTGGATCTGGGACAGAATTTACTCTCACCATCAGCAGCCTGCAGCCTGATGATTTTGCAACTTATTA
CTGCCAACAGGGTTATAGTTGGGGTAATGTTGATAATGTTTTCGGCTGCGGGACCAAGGTGGAGATCAAAGGTGGTG
GCGGCTCTGGAGGAGGAGGGTCCGGACGGTCGCTGGTGGAGTCTGGGGGAGGCTTGGTCCAGCCTGGGGGGTCCCTG
AGACTCTCCTGTACTGCCTCTGGATTCACCATCAGTAGCTACCACATGCAGTGGGTCCGGCAGGCACCTGGGAAGTG
CCTGGAGTACATCGGAACCATTAGTAGTGGTGGTAATGTATACTACGCAAGCTCCGCTAGAGGCAGATTCACCATCT
CCAGACCCTCGTCCAAGAACACGGTGGATCTTCAAATGAACAGCCTGAGAGCCGAGGACACGGCTGTGTATTACTGT
GCGAGAGACTCTGGTTATAGTGATCCTATGTGGGGCCAGGGAACCCTGGTCACCGTCTCTTCAGGCGGTGGCGGTAG
TGGGGGAGGCGGTTCTGGCGGCGGAGGGTCCGGCGGTGGAGGATCAGACGTTGTGATGACCCAGTCTCCATCTTCCG
TGTCTGCATCTGTAGGAGACAGAGTCACCATCACCTGTCAGGCCAGTCAGAACATTAGGACTTACTTATCCTGGTAT
CAGCAGAAACCAGGGAAAGCCCCTAAGCTCCTGATCTATGCTGCAGCCAATCTGGCATCTGGGGTCCCATCAAGGTT
CAGCGGCAGTGGATCTGGGACAGATTTCACTCTCACCATCAGCGACTTGGAACCTGGCGATGCTGCAACTTACTATT
GTCAGTCTACCTATCTTGGTACTGATTATGTTGGCGGTGCTTTCGGCTGTGGGACCAAGGTGGAGATCAAATGA
>SEQ ID 66 SI-49P3 chain A aa
EIVMTQSPSTLSASVGDRVIITCQASESISSWLAWYQQKPGKAPKLLIYEASKLASGVPSRFSGSGSGAEFTLTISS
LQPDDFATYYCQGYFYFISRTYVNSFGCGTKLTVLGGGGSGGGGSGGGGSGGGGSEVQLVESGGGLVQPGGSLRLSC
TASGFTISTNAMSWVRQAPGKCLEWVGVITGRDITYYASWAKGRFTISRDTSKNTVYLQMNSLRAEDTAVYYCARDG
GSSAITSNNIWGQGTLVTVSTGGGGSGGGGSEVQLVESGGGLVQPGGSLRLSCAASGFNIKDTYIHWVRQAPGKGLE
WVARIYPTNGYTRYADSVKGRFTISADTSKNTAYLQMNSLRAEDTAVYYCSRWGGDGFYAMDYWGQGTLVTVSSAST
KGPSVFPLAPSSKSTSGGTAALGCLVKDYFPEPVTVSWNSGALTSGVHTFPAVLQSSGLYSLSSVVTVPSSSLGTQT
YICNVNHKPSNTKVDKRVEPKSCDKTHTCPPCPAPEAAGGPSVFLFPPKPKDTLMISRTPEVTCVVVDVSHEDPEVK
FNWYVDGVEVHNAKTKPREEQYASTYRVVSVLTVLHQDWLNGKEYKCAVSNKALPAPIEKTISKAKGQPREPQVYTL
PPSRDELTKNQVSLTCLVKGFYPSDIAVEWESNGQPENNYKTTPPVLDSDGSFFLYSKLTVDKSRWQQGNVFSCSVM
HEALHNHYTQKSLSLSPGGGGGSGGGGSEVQLLESGGGLVQPGGSLRLSCAASGFSFSSGYDMCWVRQAPGKCLEWI
ACIAAGSAGITYDANWAKGRFTISRDNSKNTLYLQMNSLRAEDTAVYYCARSAFSFDYAMDLWGQGTLVTVSSGGGG
SGGGGSGGGGSGGGGSDIQMTQSPSTLSASVGDRVTITCQASQSISSHLNWYQQKPGKAPKLLIYKASTLASGVPSR
FSGSGSGTEFTLTISSLQPDDFATYYCQQGYSWGNVDNVFGCGTKVEIKGGGGSGGGGSGRSLVESGGGLVQPGGSL
RLSCTASGFTISSYHMQWVRQAPGKCLEYIGTISSGGNVYYASSARGRFTISRPSSKNTVDLQMNSLRAEDTAVYYC
ARDSGYSDPMWGQGTLVTVSSGGGGSGGGGSGGGGSGGGGSDVVMTQSPSSVSASVGDRVTITCQASQNIRTYLSWY
QQKPGKAPKLLIYAAANLASGVPSRFSGSGSGTDFTLTISDLEPGDAATYYCQSTYLGTDYVGGAFGCGTKVEIK
>SEQ ID 67 SI-49P3 chain B nt
GATATCCAGATGACCCAGTCCCCGAGCTCCCTGTCCGCCTCTGTGGGCGATAGGGTCACCATCACCTGCCGTGCCAG
TCAGGATGTGAATACTGCTGTAGCCTGGTATCAACAGAAACCAGGAAAAGCTCCGAAACTACTGATTTACTCGGCAT
CCTTCCTCTACTCTGGAGTCCCTTCTCGCTTCTCTGGCTCCAGATCTGGGACGGATTTCACTCTGACCATCAGCAGT
CTGCAGCCGGAAGACTTCGCAACTTATTACTGTCAGCAACATTATACTACTCCTCCCACGTTCGGACAGGGTACCAA
GGTGGAGATCAAACGTACGGTGGCTGCACCATCTGTCTTCATCTTCCCGCCATCTGATGAGCAGTTGAAATCTGGAA
CTGCCTCTGTTGTGTGCCTGCTGAATAACTTCTATCCCAGAGAGGCCAAAGTACAGTGGAAGGTGGATAACGCCCTC
CAATCGGGTAACTCCCAGGAGAGTGTCACAGAGCAGGACAGCAAGGACAGCACCTACAGCCTCAGCAGCACCCTGAC
GCTGAGCAAAGCAGACTACGAGAAACACAAAGTCTACGCCTGCGAAGTCACCCATCAGGGCCTGAGCTCGCCCGTCA
CAAAGAGCTTCAACAGGGGAGAGTGTGGCGGTGGAGGGTCCGGCGGTGGTGGATCCTTTCTTAATTCCCTTTTCAAC
CAAGAGGTTCAGATCCCCTTGACTGAAAGCTATTGCGGCCCTTGTCCGAAAAACTGGATATGTTACAAGAATAATTG
TTACCAATTCTTCGACGAAAGCAAGAACTGGTATGAGAGTCAGGCGTCTTGTATGAGTCAGAATGCCAGCCTGCTTA
AGGTTTATTCAAAAGAAGACCAGGATCTGCTTAAGTTGGTAAAGAGCTACCACTGGATGGGGCTGGTACATATCCCA
ACGAATGGGTCATGGCAGTGGGAGGACGGTTCTATTCTGAGTCCAAATCTCCTGACGATCATCGAAATGCAGAAAGG
GGACTGTGCCCTGTATGCATCATCCTTCAAGGGGTACATCGAGAACTGCAGTACCCCAAATACCTACATTTGTATGC
AAAGAACGGTTGGAGGCGGTGGCTCAGGCGGAGGCGGCTCAGGAGGTGGCGGTTCAGGAGGCGGCGGATCTTTCCTA
AACTCATTATTCAACCAAGAAGTTCAAATTCCCTTGACCGAAAGTTACTGTGGCCCATGTCCTAAAAACTGGATATG
TTACAAAAATAACTGCTACCAATTTTTTGATGAGAGTAAAAACTGGTATGAGAGCCAGGCTTCTTGTATGTCTCAAA
ATGCCAGCCTTCTGAAAGTATACAGCAAAGAGGACCAGGATTTACTTAAACTGGTGAAGTCATATCATTGGATGGGA
CTAGTACACATTCCAACAAATGGATCTTGGCAGTGGGAAGATGGCTCCATTCTCTCACCCAACCTACTAACAATAAT
TGAAATGCAGAAGGGAGACTGTGCACTCTATGCCTCGAGCTTTAAAGGCTATATAGAAAACTGTTCAACTCCAAATA
CGTACATCTGCATGCAAAGGACTGTGTAG
>SEQ ID 68 SI-49P3 chain B aa
DIQMTQSPSSLSASVGDRVTITCRASQDVNTAVAWYQQKPGKAPKLLIYSASFLYSGVPSRFSGSRSGTDFTLTISS
LQPEDFATYYCQQHYTTPPTFGQGTKVEIKRTVAAPSVFIFPPSDEQLKSGTASVVCLLNNFYPREAKVQWKVDNAL
QSGNSQESVTEQDSKDSTYSLSSTLTLSKADYEKHKVYACEVTHQGLSSPVTKSFNRGECGGGGSGGGGSFLNSLFN
QEVQIPLTESYCGPCPKNWICYKNNCYQFFDESKNWYESQASCMSQNASLLKVYSKEDQDLLKLVKSYHWMGLVHIP
TNGSWQWEDGSILSPNLLTIIEMQKGDCALYASSFKGYIENCSTPNTYICMQRTVGGGGSGGGGSGGGGSGGGGSFL
NSLFNQEVQIPLTESYCGPCPKNWICYKNNCYQFFDESKNWYESQASCMSQNASLLKVYSKEDQDLLKLVKSYHWMG
LVHIPTNGSWQWEDGSILSPNLLTIIEMQKGDCALYASSFKGYIENCSTPNTYICMQRTV
>SEQ ID 69 SI-49P4 chain A nt
GAGATCGTGATGACCCAGAGCCCCAGCACCCTGAGCGCCAGCGTGGGCGACAGGGTGATCATCACCTGCCAGGCCAG
CGAGAGCATCAGCAGCTGGCTGGCCTGGTACCAGCAGAAGCCCGGCAAGGCCCCCAAGCTGCTGATCTACGAGGCCA
GCAAGCTGGCCAGCGGCGTGCCCAGCAGGTTCAGCGGCAGCGGCAGCGGCGCCGAGTTCACCCTGACCATCAGCAGC
CTGCAGCCCGACGACTTCGCCACCTACTACTGCCAGGGCTACTTCTACTTCATCAGCAGGACCTACGTGAACAGCTT
CGGCTGCGGCACCAAGCTGACCGTGCTGGGCGGTGGCGGTAGTGGGGGAGGCGGTTCTGGCGGCGGAGGGTCCGGCG
GTGGAGGATCAGAGGTGCAGCTGGTGGAGAGCGGCGGCGGCCTGGTGCAGCCCGGCGGCAGCCTGAGGCTGAGCTGC
ACCGCCAGCGGCTTCACCATCAGCACCAACGCCATGAGCTGGGTGAGGCAGGCCCCCGGCAAGTGCCTGGAGTGGGT
GGGCGTGATCACCGGCAGGGACATCACCTACTACGCCAGCTGGGCCAAGGGCAGGTTCACCATCAGCAGGGACACCA
GCAAGAACACCGTGTACCTGCAGATGAACAGCCTGAGGGCCGAGGACACCGCCGTGTACTACTGCGCCAGGGACGGC
GGCAGCAGCGCCATCACCAGCAACAACATCTGGGGCCAGGGCACCCTGGTGACCGTGTCGACAGGCGGTGGAGGGTC
CGGCGGTGGTGGATCAGATGTGCAGCTTCAGGAGTCGGGACCTAGCCTGGTGAAACCTTCTCAGTCTCTGTCCCTCA
CCTGCACTGTCACTGGCTACTCAATCACCAGTGATTTTGCCTGGAACTGGATTCGGCAGTTTCCAGGAAACAAGCTG
GAGTGGATGGGCTACATAAGTTATAGTGGTAACACTAGGTACAACCCATCTCTCAAAAGTCGAATCTCTATCACTCG
CGACACATCCAAGAACCAATTCTTCCTGCAGTTGAACTCTGTGACTATTGAGGACACAGCCACATATTACTGTGTAA
CGGCGGGACGCGGGTTTCCTTATTGGGGCCAAGGGACTCTGGTCACTGTCTCTGCAGCTAGCACCAAGGGCCCATCG
GTCTTCCCCCTGGCACCCTCCTCCAAGAGCACCTCTGGGGGCACAGCGGCCCTGGGCTGCCTGGTCAAGGACTACTT
CCCCGAACCGGTGACGGTGTCGTGGAACTCAGGCGCCCTGACCAGCGGCGTGCACACCTTCCCGGCTGTCCTACAGT
CCTCAGGACTCTACTCCCTCAGCAGCGTGGTGACCGTGCCCTCCAGCAGCTTGGGCACCCAGACCTACATCTGCAAC
GTGAATCACAAGCCCAGCAACACCAAGGTGGACAAGAGAGTTGAGCCCAAATCTTGTGACAAAACTCACACATGCCC
ACCGTGCCCAGCACCTGAAGCCGCGGGGGGACCGTCAGTCTTCCTCTTCCCCCCAAAACCCAAGGACACCCTCATGA
TCTCCCGGACCCCTGAGGTCACATGCGTGGTGGTGGACGTGAGCCACGAAGACCCTGAGGTCAAGTTCAACTGGTAC
GTGGACGGCGTGGAGGTGCATAATGCCAAGACAAAGCCGCGGGAGGAGCAGTACGCCAGCACGTACCGTGTGGTCAG
CGTCCTCACCGTCCTGCACCAGGACTGGCTGAATGGCAAGGAGTACAAGTGCGCGGTCTCCAACAAAGCCCTCCCAG
CCCCCATCGAGAAAACCATCTCCAAAGCCAAAGGGCAGCCCCGAGAACCACAGGTGTACACCCTGCCCCCATCCCGG
GATGAGCTGACCAAGAACCAGGTCAGCCTGACCTGCCTGGTCAAAGGCTTCTATCCCAGCGACATCGCCGTGGAGTG
GGAGAGCAATGGGCAGCCGGAGAACAACTACAAGACCACGCCTCCCGTGCTGGACTCCGACGGCTCCTTCTTCCTCT
ATAGCAAGCTCACCGTGGACAAGAGCAGGTGGCAGCAGGGGAACGTCTTCTCATGCTCCGTGATGCATGAGGCTCTG
CACAACCACTACACGCAGAAGAGCCTCTCCCTGTCTCCGGGTGGCGGTGGAGGGTCCGGCGGTGGTGGATCCGAGGT
GCAGCTGTTGGAGTCTGGGGGAGGCTTGGTACAGCCTGGGGGGTCCCTGAGACTCTCCTGTGCAGCCTCTGGATTCT
CCTTCAGTAGCGGGTACGACATGTGCTGGGTCCGCCAGGCTCCAGGGAAGTGCCTGGAGTGGATCGCATGCATTGCT
GCTGGTAGTGCTGGTATCACTTACGACGCGAACTGGGCGAAAGGCCGGTTCACCATCTCCAGAGACAATTCCAAGAA
CACGCTGTATCTGCAAATGAACAGCCTGAGAGCCGAGGACACGGCCGTATATTACTGTGCGAGATCGGCGTTTTCGT
TCGACTACGCCATGGACCTCTGGGGCCAGGGAACCCTGGTCACCGTCTCGAGCGGTGGAGGCGGTTCAGGCGGAGGT
GGAAGTGGTGGTGGCGGCTCTGGAGGCGGCGGATCTGACATCCAGATGACCCAGTCTCCTTCCACCCTGTCTGCATC
TGTAGGAGACAGAGTCACCATCACTTGCCAGGCCAGTCAGAGCATTAGTTCCCACTTAAACTGGTATCAGCAGAAAC
CAGGGAAAGCCCCTAAGCTCCTGATCTATAAGGCATCCACTCTGGCATCTGGGGTCCCATCAAGGTTCAGCGGCAGT
GGATCTGGGACAGAATTTACTCTCACCATCAGCAGCCTGCAGCCTGATGATTTTGCAACTTATTACTGCCAACAGGG
TTATAGTTGGGGTAATGTTGATAATGTTTTCGGCTGCGGGACCAAGGTGGAGATCAAAGGTGGTGGCGGCTCTGGAG
GAGGAGGGTCCGGACGGTCGCTGGTGGAGTCTGGGGGAGGCTTGGTCCAGCCTGGGGGGTCCCTGAGACTCTCCTGT
ACTGCCTCTGGATTCACCATCAGTAGCTACCACATGCAGTGGGTCCGGCAGGCACCTGGGAAGTGCCTGGAGTACAT
CGGAACCATTAGTAGTGGTGGTAATGTATACTACGCAAGCTCCGCTAGAGGCAGATTCACCATCTCCAGACCCTCGT
CCAAGAACACGGTGGATCTTCAAATGAACAGCCTGAGAGCCGAGGACACGGCTGTGTATTACTGTGCGAGAGACTCT
GGTTATAGTGATCCTATGTGGGGCCAGGGAACCCTGGTCACCGTCTCTTCAGGCGGTGGCGGTAGTGGGGGAGGCGG
TTCTGGCGGCGGAGGGTCCGGCGGTGGAGGATCAGACGTTGTGATGACCCAGTCTCCATCTTCCGTGTCTGCATCTG
TAGGAGACAGAGTCACCATCACCTGTCAGGCCAGTCAGAACATTAGGACTTACTTATCCTGGTATCAGCAGAAACCA
GGGAAAGCCCCTAAGCTCCTGATCTATGCTGCAGCCAATCTGGCATCTGGGGTCCCATCAAGGTTCAGCGGCAGTGG
ATCTGGGACAGATTTCACTCTCACCATCAGCGACTTGGAACCTGGCGATGCTGCAACTTACTATTGTCAGTCTACCT
ATCTTGGTACTGATTATGTTGGCGGTGCTTTCGGCTGTGGGACCAAGGTGGAGATCAAATGA
>SEQ ID 70 SI-49P4 chain A aa
EIVMTQSPSTLSASVGDRVIITCQASESISSWLAWYQQKPGKAPKLLIYEASKLASGVPSRFSGSGSGAEFTLTISS
LQPDDFATYYCQGYFYFISRTYVNSFGCGTKLTVLGGGGSGGGGSGGGGSGGGGSEVQLVESGGGLVQPGGSLRLSC
TASGFTISTNAMSWVRQAPGKCLEWVGVITGRDITYYASWAKGRFTISRDTSKNTVYLQMNSLRAEDTAVYYCARDG
GSSAITSNNIWGQGTLVTVSTGGGGSGGGGSDVQLQESGPSLVKPSQSLSLTCTVTGYSITSDFAWNWIRQFPGNKL
EWMGYISYSGNTRYNPSLKSRISITRDTSKNQFFLQLNSVTIEDTATYYCVTAGRGFPYWGQGTLVTVSAASTKGPS
VFPLAPSSKSTSGGTAALGCLVKDYFPEPVTVSWNSGALTSGVHTFPAVLQSSGLYSLSSVVTVPSSSLGTQTYICN
VNHKPSNTKVDKRVEPKSCDKTHTCPPCPAPEAAGGPSVFLFPPKPKDTLMISRTPEVTCVVVDVSHEDPEVKFNWY
VDGVEVHNAKTKPREEQYASTYRVVSVLTVLHQDWLNGKEYKCAVSNKALPAPIEKTISKAKGQPREPQVYTLPPSR
DELTKNQVSLTCLVKGFYPSDIAVEWESNGQPENNYKTTPPVLDSDGSFFLYSKLTVDKSRWQQGNVFSCSVMHEAL
HNHYTQKSLSLSPGGGGGSGGGGSEVQLLESGGGLVQPGGSLRLSCAASGFSFSSGYDMCWVRQAPGKCLEWIACIA
AGSAGITYDANWAKGRFTISRDNSKNTLYLQMNSLRAEDTAVYYCARSAFSFDYAMDLWGQGTLVTVSSGGGGSGGG
GSGGGGSGGGGSDIQMTQSPSTLSASVGDRVTITCQASQSISSHLNWYQQKPGKAPKLLIYKASTLASGVPSRFSGS
GSGTEFTLTISSLQPDDFATYYCQQGYSWGNVDNVFGCGTKVEIKGGGGSGGGGSGRSLVESGGGLVQPGGSLRLSC
TASGFTISSYHMQWVRQAPGKCLEYIGTISSGGNVYYASSARGRFTISRPSSKNTVDLQMNSLRAEDTAVYYCARDS
GYSDPMWGQGTLVTVSSGGGGSGGGGSGGGGSGGGGSDVVMTQSPSSVSASVGDRVTITCQASQNIRTYLSWYQQKP
GKAPKLLIYAAANLASGVPSRFSGSGSGTDFTLTISDLEPGDAATYYCQSTYLGTDYVGGAFGCGTKVEIK
>SEQ ID 71 SI-49P4 chain B nt
GACATCCTGATGACCCAATCTCCATCCTCCATGTCTGTATCTCTGGGAGACACAGTCAGCATCACTTGCCATTCAAG
TCAGGACATTAACAGTAATATAGGGTGGTTGCAGCAGAGACCAGGGAAATCATTTAAGGGCCTGATCTATCATGGAA
CCAACTTGGACGATGAAGTTCCATCAAGGTTCAGTGGCAGTGGATCTGGAGCCGATTATTCTCTCACCATCAGCAGC
CTGGAATCTGAAGATTTTGCAGACTATTACTGTGTACAGTATGCTCAGTTTCCGTGGACGTTCGGTGGAGGCACCAA
GCTGGAAATCAAACGTACGGTGGCTGCACCATCTGTCTTCATCTTCCCGCCATCTGATGAGCAGTTGAAATCTGGAA
CTGCCTCTGTTGTGTGCCTGCTGAATAACTTCTATCCCAGAGAGGCCAAAGTACAGTGGAAGGTGGATAACGCCCTC
CAATCGGGTAACTCCCAGGAGAGTGTCACAGAGCAGGACAGCAAGGACAGCACCTACAGCCTCAGCAGCACCCTGAC
GCTGAGCAAAGCAGACTACGAGAAACACAAAGTCTACGCCTGCGAAGTCACCCATCAGGGCCTGAGCTCGCCCGTCA
CAAAGAGCTTCAACAGGGGAGAGTGTGGCGGTGGAGGGTCCGGCGGTGGTGGATCCTTTCTTAATTCCCTTTTCAAC
CAAGAGGTTCAGATCCCCTTGACTGAAAGCTATTGCGGCCCTTGTCCGAAAAACTGGATATGTTACAAGAATAATTG
TTACCAATTCTTCGACGAAAGCAAGAACTGGTATGAGAGTCAGGCGTCTTGTATGAGTCAGAATGCCAGCCTGCTTA
AGGTTTATTCAAAAGAAGACCAGGATCTGCTTAAGTTGGTAAAGAGCTACCACTGGATGGGGCTGGTACATATCCCA
ACGAATGGGTCATGGCAGTGGGAGGACGGTTCTATTCTGAGTCCAAATCTCCTGACGATCATCGAAATGCAGAAAGG
GGACTGTGCCCTGTATGCATCATCCTTCAAGGGGTACATCGAGAACTGCAGTACCCCAAATACCTACATTTGTATGC
AAAGAACGGTTGGAGGCGGTGGCTCAGGCGGAGGCGGCTCAGGAGGTGGCGGTTCAGGAGGCGGCGGATCTTTCCTA
AACTCATTATTCAACCAAGAAGTTCAAATTCCCTTGACCGAAAGTTACTGTGGCCCATGTCCTAAAAACTGGATATG
TTACAAAAATAACTGCTACCAATTTTTTGATGAGAGTAAAAACTGGTATGAGAGCCAGGCTTCTTGTATGTCTCAAA
ATGCCAGCCTTCTGAAAGTATACAGCAAAGAGGACCAGGATTTACTTAAACTGGTGAAGTCATATCATTGGATGGGA
CTAGTACACATTCCAACAAATGGATCTTGGCAGTGGGAAGATGGCTCCATTCTCTCACCCAACCTACTAACAATAAT
TGAAATGCAGAAGGGAGACTGTGCACTCTATGCCTCGAGCTTTAAAGGCTATATAGAAAACTGTTCAACTCCAAATA
CGTACATCTGCATGCAAAGGACTGTGTAG
>SEQ ID 72 SI-49P4 chain B aa
DILMTQSPSSMSVSLGDTVSITCHSSQDINSNIGWLQQRPGKSFKGLIYHGTNLDDEVPSRFSGSGSGADYSLTISS
LESEDFADYYCVQYAQFPWTFGGGTKLEIKRTVAAPSVFIFPPSDEQLKSGTASVVCLLNNFYPREAKVQWKVDNAL
QSGNSQESVTEQDSKDSTYSLSSTLTLSKADYEKHKVYACEVTHQGLSSPVTKSFNRGECGGGGSGGGGSFLNSLFN
QEVQIPLTESYCGPCPKNWICYKNNCYQFFDESKNWYESQASCMSQNASLLKVYSKEDQDLLKLVKSYHWMGLVHIP
TNGSWQWEDGSILSPNLLTIIEMQKGDCALYASSFKGYIENCSTPNTYICMQRTVGGGGSGGGGSGGGGSGGGGSFL
NSLFNQEVQIPLTESYCGPCPKNWICYKNNCYQFFDESKNWYESQASCMSQNASLLKVYSKEDQDLLKLVKSYHWMG
LVHIPTNGSWQWEDGSILSPNLLTIIEMQKGDCALYASSFKGYIENCSTPNTYICMQRTV
>SEQ ID 73 SI-49P5 chain A nt
GAGATCGTGATGACCCAGAGCCCCAGCACCCTGAGCGCCAGCGTGGGCGACAGGGTGATCATCACCTGCCAGGCCAG
CGAGAGCATCAGCAGCTGGCTGGCCTGGTACCAGCAGAAGCCCGGCAAGGCCCCCAAGCTGCTGATCTACGAGGCCA
GCAAGCTGGCCAGCGGCGTGCCCAGCAGGTTCAGCGGCAGCGGCAGCGGCGCCGAGTTCACCCTGACCATCAGCAGC
CTGCAGCCCGACGACTTCGCCACCTACTACTGCCAGGGCTACTTCTACTTCATCAGCAGGACCTACGTGAACAGCTT
CGGCTGCGGCACCAAGCTGACCGTGCTGGGCGGTGGCGGTAGTGGGGGAGGCGGTTCTGGCGGCGGAGGGTCCGGCG
GTGGAGGATCAGAGGTGCAGCTGGTGGAGAGCGGCGGCGGCCTGGTGCAGCCCGGCGGCAGCCTGAGGCTGAGCTGC
ACCGCCAGCGGCTTCACCATCAGCACCAACGCCATGAGCTGGGTGAGGCAGGCCCCCGGCAAGTGCCTGGAGTGGGT
GGGCGTGATCACCGGCAGGGACATCACCTACTACGCCAGCTGGGCCAAGGGCAGGTTCACCATCAGCAGGGACACCA
GCAAGAACACCGTGTACCTGCAGATGAACAGCCTGAGGGCCGAGGACACCGCCGTGTACTACTGCGCCAGGGACGGC
GGCAGCAGCGCCATCACCAGCAACAACATCTGGGGCCAGGGCACCCTGGTGACCGTGTCGACAGGCGGTGGAGGGTC
CGGCGGTGGTGGATCAGAGGTCCAATTGGTACAATCCGGCGCTGAGGTTAAGAAACCGGGTTCCTCAGTCAAAGTTA
GTTGTAAGGCATCAGGTTACACGATCACTGATAGTAACATACATTGGGTGAGACAGGCTCCTGGGCAGTCCCTTGAG
TGGATTGGATACATTTATCCATATAATGGCGGCACGGATTACAACCAGAAATTTAAGAATAGAGCGACACTGACCGT
TGACAACCCCACCAATACCGCGTATATGGAATTGTCAAGCCTGAGGTCTGAGGACACGGCCTTCTACTATTGCGTAA
ACGGTAACCCGTGGCTGGCCTACTGGGGGCAGGGGACACTCGTAACCGTCTCTTCTGCTAGCACCAAGGGCCCATCG
GTCTTCCCCCTGGCACCCTCCTCCAAGAGCACCTCTGGGGGCACAGCGGCCCTGGGCTGCCTGGTCAAGGACTACTT
CCCCGAACCGGTGACGGTGTCGTGGAACTCAGGCGCCCTGACCAGCGGCGTGCACACCTTCCCGGCTGTCCTACAGT
CCTCAGGACTCTACTCCCTCAGCAGCGTGGTGACCGTGCCCTCCAGCAGCTTGGGCACCCAGACCTACATCTGCAAC
GTGAATCACAAGCCCAGCAACACCAAGGTGGACAAGAGAGTTGAGCCCAAATCTTGTGACAAAACTCACACATGCCC
ACCGTGCCCAGCACCTGAAGCCGCGGGGGGACCGTCAGTCTTCCTCTTCCCCCCAAAACCCAAGGACACCCTCATGA
TCTCCCGGACCCCTGAGGTCACATGCGTGGTGGTGGACGTGAGCCACGAAGACCCTGAGGTCAAGTTCAACTGGTAC
GTGGACGGCGTGGAGGTGCATAATGCCAAGACAAAGCCGCGGGAGGAGCAGTACGCCAGCACGTACCGTGTGGTCAG
CGTCCTCACCGTCCTGCACCAGGACTGGCTGAATGGCAAGGAGTACAAGTGCGCGGTCTCCAACAAAGCCCTCCCAG
CCCCCATCGAGAAAACCATCTCCAAAGCCAAAGGGCAGCCCCGAGAACCACAGGTGTACACCCTGCCCCCATCCCGG
GATGAGCTGACCAAGAACCAGGTCAGCCTGACCTGCCTGGTCAAAGGCTTCTATCCCAGCGACATCGCCGTGGAGTG
GGAGAGCAATGGGCAGCCGGAGAACAACTACAAGACCACGCCTCCCGTGCTGGACTCCGACGGCTCCTTCTTCCTCT
ATAGCAAGCTCACCGTGGACAAGAGCAGGTGGCAGCAGGGGAACGTCTTCTCATGCTCCGTGATGCATGAGGCTCTG
CACAACCACTACACGCAGAAGAGCCTCTCCCTGTCTCCGGGTGGCGGTGGAGGGTCCGGCGGTGGTGGATCCGAGGT
GCAGCTGTTGGAGTCTGGGGGAGGCTTGGTACAGCCTGGGGGGTCCCTGAGACTCTCCTGTGCAGCCTCTGGATTCT
CCTTCAGTAGCGGGTACGACATGTGCTGGGTCCGCCAGGCTCCAGGGAAGTGCCTGGAGTGGATCGCATGCATTGCT
GCTGGTAGTGCTGGTATCACTTACGACGCGAACTGGGCGAAAGGCCGGTTCACCATCTCCAGAGACAATTCCAAGAA
CACGCTGTATCTGCAAATGAACAGCCTGAGAGCCGAGGACACGGCCGTATATTACTGTGCGAGATCGGCGTTTTCGT
TCGACTACGCCATGGACCTCTGGGGCCAGGGAACCCTGGTCACCGTCTCGAGCGGTGGAGGCGGTTCAGGCGGAGGT
GGAAGTGGTGGTGGCGGCTCTGGAGGCGGCGGATCTGACATCCAGATGACCCAGTCTCCTTCCACCCTGTCTGCATC
TGTAGGAGACAGAGTCACCATCACTTGCCAGGCCAGTCAGAGCATTAGTTCCCACTTAAACTGGTATCAGCAGAAAC
CAGGGAAAGCCCCTAAGCTCCTGATCTATAAGGCATCCACTCTGGCATCTGGGGTCCCATCAAGGTTCAGCGGCAGT
GGATCTGGGACAGAATTTACTCTCACCATCAGCAGCCTGCAGCCTGATGATTTTGCAACTTATTACTGCCAACAGGG
TTATAGTTGGGGTAATGTTGATAATGTTTTCGGCTGCGGGACCAAGGTGGAGATCAAAGGTGGTGGCGGCTCTGGAG
GAGGAGGGTCCGGACGGTCGCTGGTGGAGTCTGGGGGAGGCTTGGTCCAGCCTGGGGGGTCCCTGAGACTCTCCTGT
ACTGCCTCTGGATTCACCATCAGTAGCTACCACATGCAGTGGGTCCGGCAGGCACCTGGGAAGTGCCTGGAGTACAT
CGGAACCATTAGTAGTGGTGGTAATGTATACTACGCAAGCTCCGCTAGAGGCAGATTCACCATCTCCAGACCCTCGT
CCAAGAACACGGTGGATCTTCAAATGAACAGCCTGAGAGCCGAGGACACGGCTGTGTATTACTGTGCGAGAGACTCT
GGTTATAGTGATCCTATGTGGGGCCAGGGAACCCTGGTCACCGTCTCTTCAGGCGGTGGCGGTAGTGGGGGAGGCGG
TTCTGGCGGCGGAGGGTCCGGCGGTGGAGGATCAGACGTTGTGATGACCCAGTCTCCATCTTCCGTGTCTGCATCTG
TAGGAGACAGAGTCACCATCACCTGTCAGGCCAGTCAGAACATTAGGACTTACTTATCCTGGTATCAGCAGAAACCA
GGGAAAGCCCCTAAGCTCCTGATCTATGCTGCAGCCAATCTGGCATCTGGGGTCCCATCAAGGTTCAGCGGCAGTGG
ATCTGGGACAGATTTCACTCTCACCATCAGCGACTTGGAACCTGGCGATGCTGCAACTTACTATTGTCAGTCTACCT
ATCTTGGTACTGATTATGTTGGCGGTGCTTTCGGCTGTGGGACCAAGGTGGAGATCAAATGA
>SEQ ID 74 SI-49P5 chain A aa
EIVMTQSPSTLSASVGDRVIITCQASESISSWLAWYQQKPGKAPKLLIYEASKLASGVPSRFSGSGSGAEFTLTISS
LQPDDFATYYCQGYFYFISRTYVNSFGCGTKLTVLGGGGSGGGGSGGGGSGGGGSEVQLVESGGGLVQPGGSLRLSC
TASGFTISTNAMSWVRQAPGKCLEWVGVITGRDITYYASWAKGRFTISRDTSKNTVYLQMNSLRAEDTAVYYCARDG
GSSAITSNNIWGQGTLVTVSTGGGGSGGGGSEVQLVQSGAEVKKPGSSVKVSCKASGYTITDSNIHWVRQAPGQSLE
WIGYIYPYNGGTDYNQKFKNRATLTVDNPTNTAYMELSSLRSEDTAFYYCVNGNPWLAYWGQGTLVTVSSASTKGPS
VFPLAPSSKSTSGGTAALGCLVKDYFPEPVTVSWNSGALTSGVHTFPAVLQSSGLYSLSSVVTVPSSSLGTQTYICN
VNHKPSNTKVDKRVEPKSCDKTHTCPPCPAPEAAGGPSVFLFPPKPKDTLMISRTPEVTCVVVDVSHEDPEVKFNWY
VDGVEVHNAKTKPREEQYASTYRVVSVLTVLHQDWLNGKEYKCAVSNKALPAPIEKTISKAKGQPREPQVYTLPPSR
DELTKNQVSLTCLVKGFYPSDIAVEWESNGQPENNYKTTPPVLDSDGSFFLYSKLTVDKSRWQQGNVFSCSVMHEAL
HNHYTQKSLSLSPGGGGGSGGGGSEVQLLESGGGLVQPGGSLRLSCAASGFSFSSGYDMCWVRQAPGKCLEWIACIA
AGSAGITYDANWAKGRFTISRDNSKNTLYLQMNSLRAEDTAVYYCARSAFSFDYAMDLWGQGTLVTVSSGGGGSGGG
GSGGGGSGGGGSDIQMTQSPSTLSASVGDRVTITCQASQSISSHLNWYQQKPGKAPKLLIYKASTLASGVPSRFSGS
GSGTEFTLTISSLQPDDFATYYCQQGYSWGNVDNVFGCGTKVEIKGGGGSGGGGSGRSLVESGGGLVQPGGSLRLSC
TASGFTISSYHMQWVRQAPGKCLEYIGTISSGGNVYYASSARGRFTISRPSSKNTVDLQMNSLRAEDTAVYYCARDS
GYSDPMWGQGTLVTVSSGGGGSGGGGSGGGGSGGGGSDVVMTQSPSSVSASVGDRVTITCQASQNIRTYLSWYQQKP
GKAPKLLIYAAANLASGVPSRFSGSGSGTDFTLTISDLEPGDAATYYCQSTYLGTDYVGGAFGCGTKVEIK
>SEQ ID 75 SI-49P5 chain B nt
GATATACAACTTACGCAGTCTCCCTCCACTCTGTCAGCGTCCGTAGGGGACAGAGTAACGATAACATGCAGGGCCTC
AGAAAGTCTTGACAACTACGGCATAAGGTTCCTCACATGGTTTCAACAGAAGCCGGGTAAAGCACCAAAACTCCTGA
TGTATGCTGCGTCTAACCAGGGGTCCGGTGTTCCTAGTCGGTTTTCAGGCAGCGGTAGCGGTACCGAGTTCACTCTC
ACAATTTCCAGTCTTCAGCCTGACGATTTCGCAACGTATTATTGCCAACAAACTAAGGAAGTGCCTTGGAGCTTTGG
GCAAGGCACCAAGGTCGAGGTGAAGCGTACGGTGGCTGCACCATCTGTCTTCATCTTCCCGCCATCTGATGAGCAGT
TGAAATCTGGAACTGCCTCTGTTGTGTGCCTGCTGAATAACTTCTATCCCAGAGAGGCCAAAGTACAGTGGAAGGTG
GATAACGCCCTCCAATCGGGTAACTCCCAGGAGAGTGTCACAGAGCAGGACAGCAAGGACAGCACCTACAGCCTCAG
CAGCACCCTGACGCTGAGCAAAGCAGACTACGAGAAACACAAAGTCTACGCCTGCGAAGTCACCCATCAGGGCCTGA
GCTCGCCCGTCACAAAGAGCTTCAACAGGGGAGAGTGTGGCGGTGGAGGGTCCGGCGGTGGTGGATCCTTTCTTAAT
TCCCTTTTCAACCAAGAGGTTCAGATCCCCTTGACTGAAAGCTATTGCGGCCCTTGTCCGAAAAACTGGATATGTTA
CAAGAATAATTGTTACCAATTCTTCGACGAAAGCAAGAACTGGTATGAGAGTCAGGCGTCTTGTATGAGTCAGAATG
CCAGCCTGCTTAAGGTTTATTCAAAAGAAGACCAGGATCTGCTTAAGTTGGTAAAGAGCTACCACTGGATGGGGCTG
GTACATATCCCAACGAATGGGTCATGGCAGTGGGAGGACGGTTCTATTCTGAGTCCAAATCTCCTGACGATCATCGA
AATGCAGAAAGGGGACTGTGCCCTGTATGCATCATCCTTCAAGGGGTACATCGAGAACTGCAGTACCCCAAATACCT
ACATTTGTATGCAAAGAACGGTTGGAGGCGGTGGCTCAGGCGGAGGCGGCTCAGGAGGTGGCGGTTCAGGAGGCGGC
GGATCTTTCCTAAACTCATTATTCAACCAAGAAGTTCAAATTCCCTTGACCGAAAGTTACTGTGGCCCATGTCCTAA
AAACTGGATATGTTACAAAAATAACTGCTACCAATTTTTTGATGAGAGTAAAAACTGGTATGAGAGCCAGGCTTCTT
GTATGTCTCAAAATGCCAGCCTTCTGAAAGTATACAGCAAAGAGGACCAGGATTTACTTAAACTGGTGAAGTCATAT
CATTGGATGGGACTAGTACACATTCCAACAAATGGATCTTGGCAGTGGGAAGATGGCTCCATTCTCTCACCCAACCT
ACTAACAATAATTGAAATGCAGAAGGGAGACTGTGCACTCTATGCCTCGAGCTTTAAAGGCTATATAGAAAACTGTT
CAACTCCAAATACGTACATCTGCATGCAAAGGACTGTGTAG
>SEQ ID 76 SI-49P5 chain B aa
DIQLTQSPSTLSASVGDRVTITCRASESLDNYGIRFLTWFQQKPGKAPKLLMYAASNQGSGVPSRFSGSGSGTEETL
TISSLQPDDFATYYCQQTKEVPWSFGQGTKVEVKRTVAAPSVFIFPPSDEQLKSGTASVVCLLNNFYPREAKVQWKV
DNALQSGNSQESVTEQDSKDSTYSLSSTLTLSKADYEKHKVYACEVTHQGLSSPVTKSFNRGECGGGGSGGGGSFLN
SLFNQEVQIPLTESYCGPCPKNWICYKNNCYQFFDESKNWYESQASCMSQNASLLKVYSKEDQDLLKLVKSYHWMGL
VHIPTNGSWQWEDGSILSPNLLTIIEMQKGDCALYASSFKGYIENCSTPNTYICMQRTVGGGGSGGGGSGGGGSGGG
GSFLNSLFNQEVQIPLTESYCGPCPKNWICYKNNCYQFFDESKNWYESQASCMSQNASLLKVYSKEDQDLLKLVKSY
HWMGLVHIPTNGSWQWEDGSILSPNLLTIIEMQKGDCALYASSFKGYIENGSTPNTYICMQRTV
>SEQ ID 77 SI-49P6 chain A nt
GAGATCGTGATGACACAATCTCCATCTACGCTCTCCGCCTCAGTGGGCGATAGAGTAATTATTACTTGTCAAGCCTC
AGAGAGCATTTCATCATGGCTCGCCTGGTATCAGCAAAAGCCTGGGAAGGCCCCCAAACTTCTCATCTATGAAGCAT
CAAAGCTGGCCTCTGGGGTTCCGTCTCGCTTCTCCGGGTCCGGCAGTGGTGCAGAGTTTACGTTGACTATATCTTCT
TTGCAACCTGACGATTTCGCAACATATTATTGCCAGGGATACTTTTATTTTATTTCCCGAACATATGTTAACTCTTT
TGGGTGCGGGACCAAACTCACTGTGCTGGGGTCTACCGGTAGTGGTTCTAAGCCTGGTTCAGGCGAAGGCAGTACGA
AAGGGGAAGTGCAACTGGTCGAAAGCGGTGGAGGGCTTGTTCAACCTGGAGGAAGCCTCCGCTTGTCCTGCACGGCT
AGCGGCTTTACAATAAGTACGAACGCCATGAGCTGGGTCCGGCAGGCTCCAGGTAAGTGTCTCGAATGGGTGGGGGT
CATAACAGGCAGGGACATTACCTACTACGCCAGTTGGGCCAAGGGTCGATTTACCATTTCTAGAGATACATCCAAGA
ACACGGTGTACCTCCAGATGAATTCTCTTAGGGCGGAAGACACAGCAGTATACTACTGCGCGCGAGATGGCGGGAGC
AGTGCGATCACATCCAACAACATCTGGGGTCAGGGCACTCTTGTCACGGTGTCGACTGGTGGTGGGGGTAGTGGCGG
CGGAGGTAGCTTTCTTAATTCCCTTTTCAACCAAGAGGTTCAGATCCCCTTGACTGAAAGCTATTGCGGCCCTTGTC
CGAAAAACTGGATATGTTACAAGAATAATTGTTACCAATTCTTCGACGAAAGCAAGAACTGGTATGAGAGTCAGGCG
TCTTGTATGAGTCAGAATGCCAGCCTGCTTAAGGTTTATTCAAAAGAAGACCAGGATCTGCTTAAGTTGGTAAAGAG
CTACCACTGGATGGGGCTGGTACATATCCCAACGAATGGGTCATGGCAGTGGGAGGACGGTTCTATTCTGAGTCCAA
ATCTCCTGACGATCATCGAAATGCAGAAAGGGGACTGTGCCCTGTATGCATCATCCTTCAAGGGGTACATCGAGAAC
TGCAGTACCCCAAATACCTACATTTGTATGCAAAGAACGGTTGCTAGCACCAAGGGCCCATCGGTCTTCCCCCTGGC
ACCCTCCTCCAAGAGCACCTCTGGGGGCACAGCGGCCCTGGGCTGCCTGGTCAAGGACTACTTCCCCGAACCGGTGA
CGGTGTCGTGGAACTCAGGCGCCCTGACCAGCGGCGTGCACACCTTCCCGGCTGTCCTACAGTCCTCAGGACTCTAC
TCCCTCAGCAGCGTGGTGACCGTGCCCTCCAGCAGCTTGGGCACCCAGACCTACATCTGCAACGTGAATCACAAGCC
CAGCAACACCAAGGTGGACAAGAGAGTTGAGCCCAAATCTTGTGACAAAACTCACACATGCCCACCGTGCCCAGCAC
CTGAAGCCGCGGGGGGACCGTCAGTCTTCCTCTTCCCCCCAAAACCCAAGGACACCCTCATGATCTCCCGGACCCCT
GAGGTCACATGCGTGGTGGTGGACGTGAGCCACGAAGACCCTGAGGTCAAGTTCAACTGGTACGTGGACGGCGTGGA
GGTGCATAATGCCAAGACAAAGCCGCGGGAGGAGCAGTACGCCAGCACGTACCGTGTGGTCAGCGTCCTCACCGTCC
TGCACCAGGACTGGCTGAATGGCAAGGAGTACAAGTGCGCGGTCTCCAACAAAGCCCTCCCAGCCCCCATCGAGAAA
ACCATCTCCAAAGCCAAAGGGCAGCCCCGAGAACCACAGGTGTACACCCTGCCCCCATCCCGGGATGAGCTGACCAA
GAACCAGGTCAGCCTGACCTGCCTGGTCAAAGGCTTCTATCCCAGCGACATCGCCGTGGAGTGGGAGAGCAATGGGC
AGCCGGAGAACAACTACAAGACCACGCCTCCCGTGCTGGACTCCGACGGCTCCTTCTTCCTCTATAGCAAGCTCACC
GTGGACAAGAGCAGGTGGCAGCAGGGGAACGTCTTCTCATGCTCCGTGATGCATGAGGCTCTGCACAACCACTACAC
GCAGAAGAGCCTCTCCCTGTCTCCGGGTGGCGGTGGAGGGTCCGGCGGTGGTGGATCCGAGGTGCAGCTGTTGGAGT
CTGGGGGAGGCTTGGTACAGCCTGGGGGGTCCCTGAGACTCTCCTGTGCAGCCTCTGGATTCTCCTTCAGTAGCGGG
TACGACATGTGCTGGGTCCGCCAGGCTCCAGGGAAGTGCCTGGAGTGGATCGCATGCATTGCTGCTGGTAGTGCTGG
TATCACTTACGACGCGAACTGGGCGAAAGGCCGGTTCACCATCTCCAGAGACAATTCCAAGAACACGCTGTATCTGC
AAATGAACAGCCTGAGAGCCGAGGACACGGCCGTATATTACTGTGCGAGATCGGCGTTTTCGTTCGACTACGCCATG
GACCTCTGGGGCCAGGGAACCCTGGTCACCGTCTCGAGCGGTGGAGGCGGTTCAGGCGGAGGTGGAAGTGGTGGTGG
CGGCTCTGGAGGCGGCGGATCTGACATCCAGATGACCCAGTCTCCTTCCACCCTGTCTGCATCTGTAGGAGACAGAG
TCACCATCACTTGCCAGGCCAGTCAGAGCATTAGTTCCCACTTAAACTGGTATCAGCAGAAACCAGGGAAAGCCCCT
AAGCTCCTGATCTATAAGGCATCCACTCTGGCATCTGGGGTCCCATCAAGGTTCAGCGGCAGTGGATCTGGGACAGA
ATTTACTCTCACCATCAGCAGCCTGCAGCCTGATGATTTTGCAACTTATTACTGCCAACAGGGTTATAGTTGGGGTA
ATGTTGATAATGTTTTCGGCTGCGGGACCAAGGTGGAGATCAAAGGTGGTGGCGGCTCTGGAGGAGGAGGGTCCGGA
CGGTCGCTGGTGGAGTCTGGGGGAGGCTTGGTCCAGCCTGGGGGGTCCCTGAGACTCTCCTGTACTGCCTCTGGATT
CACCATCAGTAGCTACCACATGCAGTGGGTCCGGCAGGCACCTGGGAAGTGCCTGGAGTACATCGGAACCATTAGTA
GTGGTGGTAATGTATACTACGCAAGCTCCGCTAGAGGCAGATTCACCATCTCCAGACCCTCGTCCAAGAACACGGTG
GATCTTCAAATGAACAGCCTGAGAGCCGAGGACACGGCTGTGTATTACTGTGCGAGAGACTCTGGTTATAGTGATCC
TATGTGGGGCCAGGGAACCCTGGTCACCGTCTCTTCAGGCGGTGGCGGTAGTGGGGGAGGCGGTTCTGGCGGCGGAG
GGTCCGGCGGTGGAGGATCAGACGTTGTGATGACCCAGTCTCCATCTTCCGTGTCTGCATCTGTAGGAGACAGAGTC
ACCATCACCTGTCAGGCCAGTCAGAACATTAGGACTTACTTATCCTGGTATCAGCAGAAACCAGGGAAAGCCCCTAA
GCTCCTGATCTATGCTGCAGCCAATCTGGCATCTGGGGTCCCATCAAGGTTCAGCGGCAGTGGATCTGGGACAGATT
TCACTCTCACCATCAGCGACTTGGAACCTGGCGATGCTGCAACTTACTATTGTCAGTCTACCTATCTTGGTACTGAT
TATGTTGGCGGTGCTTTCGGCTGTGGGACCAAGGTGGAGATCAAA
>SEQ ID 78 SI-49P6 chain A aa
EIVMTQSPSTLSASVGDRVIITCQASESISSWLAWYQQKPGKAPKLLIYEASKLASGVPSRFSGSGSGAEFTLTISS
LQPDDFATYYCQGYFYFISRTYVNSFGCGTKLTVLGSTGSGSKPGSGEGSTKGEVQLVESGGGLVQPGGSLRLSCTA
SGFTISTNAMSWVRQAPGKCLEWVGVITGRDITYYASWAKGRFTISRDTSKNTVYLQMNSLRAEDTAVYYCARDGGS
SAITSNNIWGQGTLVTVSTGGGGSGGGGSFLNSLFNQEVQIPLTESYCGPCPKNWICYKNNCYQFFDESKNWYESQA
SCMSQNASLLKVYSKEDQDLLKLVKSYHWMGLVHIPTNGSWQWEDGSILSPNLLTIIEMQKGDCALYASSFKGYIEN
CSTPNTYICMQRTVASTKGPSVFPLAPSSKSTSGGTAALGCLVKDYFPEPVTVSWNSGALTSGVHTFPAVLQSSGLY
SLSSVVTVPSSSLGTQTYICNVNHKPSNTKVDKRVEPKSCDKTHTCPPCPAPEAAGGPSVFLFPPKPKDTLMISRTP
EVTCVVVDVSHEDPEVKFNWYVDGVEVHNAKTKPREEQYASTYRVVSVLTVLHQDWLNGKEYKCAVSNKALPAPIEK
TISKAKGQPREPQVYTLPPSRDELTKNQVSLTCLVKGFYPSDIAVEWESNGQPENNYKTTPPVLDSDGSFFLYSKLT
VDKSRWQQGNVFSCSVMHEALHNHYTQKSLSLSPGGGGGSGGGGSEVQLLESGGGLVQPGGSLRLSCAASGFSFSSG
YDMCWVRQAPGKCLEWIACIAAGSAGITYDANWAKGRFTISRDNSKNTLYLQMNSLRAEDTAVYYCARSAFSFDYAM
DLWGQGTLVTVSSGGGGSGGGGSGGGGSGGGGSDIQMTQSPSTLSASVGDRVTITCQASQSISSHLNWYQQKPGKAP
KLLIYKASTLASGVPSRFSGSGSGTEFTLTISSLQPDDFATYYCQQGYSWGNVDNVFGCGTKVEIKGGGGSGGGGSG
RSLVESGGGLVQPGGSLRLSCTASGFTISSYHMQWVRQAPGKCLEYIGTISSGGNVYYASSARGRFTISRPSSKNTV
DLQMNSLRAEDTAVYYCARDSGYSDPMWGQGTLVTVSSGGGGSGGGGSGGGGSGGGGSDVVMTQSPSSVSASVGDRV
TITCQASQNIRTYLSWYQQKPGKAPKLLIYAAANLASGVPSRFSGSGSGTDFTLTISDLEPGDAATYYCQSTYLGTD
YVGGAFGCGTKVEIK
>SEQ ID 79 SI-49P6 chain B nt
GAAAATGTATTGACACAGAGCCCCGCCTCCCTCAGTGCCTCACCTGGGGAAAGGGTAACTATCACTTGCTCTGCATC
AAGCAGCGTCTCATACATGCATTGGTATCAACAAAAGCCTGGACAGGCCCCCAAGCTCTGGATATACGATACGAGCA
AGCTGGCTTCCGGCGTACCTAGCCGCTTCAGTGGTTCCGGCTCAGGCAACGATCACACCCTTACGATTTCCAGTATG
GAACCCGAAGATTTTGCAACTTATTATTGTTTCCAGGGGAGCGTGTACCCATTCACTTTCGGGCAGGGGACAAAATT
GGAGATAAAGGGAAGTACTGGTTCTGGGTCTAAACCCGGTTCCGGCGAAGGTAGTACTAAAGGACAGGTCACATTGA
AGGAATCTGGCCCCGGCCTTGTTCAGCCAGGACAGACCCTTAGGCTCACCTGTGCCTTCAGTGGTTTTTCTCTTAGC
ACTAGCGGTATGGGGGTCGGCTGGATTCGGCAGCCTCCCGGCAAAGGTCTTGAGTGGTTGGCTCACATTTGGTGGGA
CGACGACAAACGGTATAATCCTGCCTTGAAAAGTCGGCTGACCATTAGTAAGGATACCTCAAAAAATCAAGTGTACT
TGCAAATGAATAGCCTTGACGCCGAGGATACGGCTGTATATTATTGCGCGCGGATGGAACTCTGGTCTTACTACTTT
GATTATTGGGGGCAGGGGACTCTCGTCACGGTGTCCTCTGGTGGCGGCGGCTCCGGGGGTGGCGGATCAGGTGGTGG
AGGATCCTTCCTAAACTCATTATTCAACCAAGAAGTTCAAATTCCCTTGACCGAAAGTTACTGTGGCCCATGTCCTA
AAAACTGGATATGTTACAAAAATAACTGCTACCAATTTTTTGATGAGAGTAAAAACTGGTATGAGAGCCAGGCTTCT
TGTATGTCTCAAAATGCCAGCCTTCTGAAAGTATACAGCAAAGAGGACCAGGATTTACTTAAACTGGTGAAGTCATA
TCATTGGATGGGACTAGTACACATTCCAACAAATGGATCTTGGCAGTGGGAAGATGGCTCCATTCTCTCACCCAACC
TACTAACAATAATTGAAATGCAGAAGGGAGACTGTGCACTCTATGCCTCGAGCTTTAAAGGCTATATAGAAAACTGT
TCAACTCCAAATACGTACATCTGCATGCAAAGGACTGTGCGTACGGTGGCTGCACCATCTGTCTTCATCTTCCCGCC
ATCTGATGAGCAGTTGAAATCTGGAACTGCCTCTGTTGTGTGCCTGCTGAATAACTTCTATCCCAGAGAGGCCAAAG
TACAGTGGAAGGTGGATAACGCCCTCCAATCGGGTAACTCCCAGGAGAGTGTCACAGAGCAGGACAGCAAGGACAGC
ACCTACAGCCTCAGCAGCACCCTGACGCTGAGCAAAGCAGACTACGAGAAACACAAAGTCTACGCCTGCGAAGTCAC
CCATCAGGGCCTGAGCTCGCCCGTCACAAAGAGCTTCAACAGGGGAGAGTGTTAG
>SEQ ID 80 SI-49P6 chain B aa
ENVLTQSPASLSASPGERVTITCSASSSVSYMHWYQQKPGQAPKLWIYDTSKLASGVPSRFSGSGSGNDHTLTISSM
EPEDFATYYCFQGSVYPFTFGQGTKLEIKGSTGSGSKPGSGEGSTKGQVTLKESGPGLVQPGQTLRLTCAFSGFSLS
TSGMGVGWIRQPPGKGLEWLAHIWWDDDKRYNPALKSRLTISKDTSKNQVYLQMNSLDAEDTAVYYCARMELWSYYF
DYWGQGTLVTVSSGGGGSGGGGSGGGGSFLNSLFNQEVQIPLTESYCGPCPKNWICYKNNCYQFFDESKNWYESQAS
CMSQNASLLKVYSKEDQDLLKLVKSYHWMGLVHIPTNGSWQWEDGSILSPNLLTIIEMQKGDCALYASSFKGYIENC
STPNTYICMQRTVRTVAAPSVFIFPPSDEQLKSGTASVVCLLNNFYPREAKVQWKVDNALQSGNSQESVTEQDSKDS
TYSLSSTLTLSKADYEKHKVYACEVTHQGLSSPVTKSFNRGEC
>SEQ ID 81 SI-49P7 chain A nt
GAGATCGTGATGACACAATCTCCATCTACGCTCTCCGCCTCAGTGGGCGATAGAGTAATTATTACTTGTCAAGCCTC
AGAGAGCATTTCATCATGGCTCGCCTGGTATCAGCAAAAGCCTGGGAAGGCCCCCAAACTTCTCATCTATGAAGCAT
CAAAGCTGGCCTCTGGGGTTCCGTCTCGCTTCTCCGGGTCCGGCAGTGGTGCAGAGTTTACGTTGACTATATCTTCT
TTGCAACCTGACGATTTCGCAACATATTATTGCCAGGGATACTTTTATTTTATTTCCCGAACATATGTTAACTCTTT
TGGGTGCGGGACCAAACTCACTGTGCTGGGGTCTACCGGTAGTGGTTCTAAGCCTGGTTCAGGCGAAGGCAGTACGA
AAGGGGAAGTGCAACTGGTCGAAAGCGGTGGAGGGCTTGTTCAACCTGGAGGAAGCCTCCGCTTGTCCTGCACGGCT
AGCGGCTTTACAATAAGTACGAACGCCATGAGCTGGGTCCGGCAGGCTCCAGGTAAGTGTCTCGAATGGGTGGGGGT
CATAACAGGCAGGGACATTACCTACTACGCCAGTTGGGCCAAGGGTCGATTTACCATTTCTAGAGATACATCCAAGA
ACACGGTGTACCTCCAGATGAATTCTCTTAGGGCGGAAGACACAGCAGTATACTACTGCGCGCGAGATGGCGGGAGC
AGTGCGATCACATCCAACAACATCTGGGGTCAGGGCACTCTTGTCACGGTGTCGACTGGTGGTGGGGGTAGTGGCGG
CGGAGGTAGCTTTCTTAATTCCCTTTTCAACCAAGAGGTTCAGATCCCCTTGACTGAAAGCTATTGCGGCCCTTGTC
CGAAAAACTGGATATGTTACAAGAATAATTGTTACCAATTCTTCGACGAAAGCAAGAACTGGTATGAGAGTCAGGCG
TCTTGTATGAGTCAGAATGCCAGCCTGCTTAAGGTTTATTCAAAAGAAGACCAGGATCTGCTTAAGTTGGTAAAGAG
CTACCACTGGATGGGGCTGGTACATATCCCAACGAATGGGTCATGGCAGTGGGAGGACGGTTCTATTCTGAGTCCAA
ATCTCCTGACGATCATCGAAATGCAGAAAGGGGACTGTGCCCTGTATGCATCATCCTTCAAGGGGTACATCGAGAAC
TGCAGTACCCCAAATACCTACATTTGTATGCAAAGAACGGTTGCTAGCACCAAGGGCCCATCGGTCTTCCCCCTGGC
ACCCTCCTCCAAGAGCACCTCTGGGGGCACAGCGGCCCTGGGCTGCCTGGTCAAGGACTACTTCCCCGAACCGGTGA
CGGTGTCGTGGAACTCAGGCGCCCTGACCAGCGGCGTGCACACCTTCCCGGCTGTCCTACAGTCCTCAGGACTCTAC
TCCCTCAGCAGCGTGGTGACCGTGCCCTCCAGCAGCTTGGGCACCCAGACCTACATCTGCAACGTGAATCACAAGCC
CAGCAACACCAAGGTGGACAAGAGAGTTGAGCCCAAATCTTGTGACAAAACTCACACATGCCCACCGTGCCCAGCAC
CTGAAGCCGCGGGGGGACCGTCAGTCTTCCTCTTCCCCCCAAAACCCAAGGACACCCTCATGATCTCCCGGACCCCT
GAGGTCACATGCGTGGTGGTGGACGTGAGCCACGAAGACCCTGAGGTCAAGTTCAACTGGTACGTGGACGGCGTGGA
GGTGCATAATGCCAAGACAAAGCCGCGGGAGGAGCAGTACGCCAGCACGTACCGTGTGGTCAGCGTCCTCACCGTCC
TGCACCAGGACTGGCTGAATGGCAAGGAGTACAAGTGCGCGGTCTCCAACAAAGCCCTCCCAGCCCCCATCGAGAAA
ACCATCTCCAAAGCCAAAGGGCAGCCCCGAGAACCACAGGTGTACACCCTGCCCCCATCCCGGGATGAGCTGACCAA
GAACCAGGTCAGCCTGACCTGCCTGGTCAAAGGCTTCTATCCCAGCGACATCGCCGTGGAGTGGGAGAGCAATGGGC
AGCCGGAGAACAACTACAAGACCACGCCTCCCGTGCTGGACTCCGACGGCTCCTTCTTCCTCTATAGCAAGCTCACC
GTGGACAAGAGCAGGTGGCAGCAGGGGAACGTCTTCTCATGCTCCGTGATGCATGAGGCTCTGCACAACCACTACAC
GCAGAAGAGCCTCTCCCTGTCTCCGGGTGGCGGTGGAGGGTCCGGCGGTGGTGGATCCGAGGTGCAGCTGTTGGAGT
CTGGGGGAGGCTTGGTACAGCCTGGGGGGTCCCTGAGACTCTCCTGTGCAGCCTCTGGATTCTCCTTCAGTAGCGGG
TACGACATGTGCTGGGTCCGCCAGGCTCCAGGGAAGTGCCTGGAGTGGATCGCATGCATTGCTGCTGGTAGTGCTGG
TATCACTTACGACGCGAACTGGGCGAAAGGCCGGTTCACCATCTCCAGAGACAATTCCAAGAACACGCTGTATCTGC
AAATGAACAGCCTGAGAGCCGAGGACACGGCCGTATATTACTGTGCGAGATCGGCGTTTTCGTTCGACTACGCCATG
GACCTCTGGGGCCAGGGAACCCTGGTCACCGTCTCGAGCGGTGGAGGCGGTTCAGGCGGAGGTGGAAGTGGTGGTGG
CGGCTCTGGAGGCGGCGGATCTGACATCCAGATGACCCAGTCTCCTTCCACCCTGTCTGCATCTGTAGGAGACAGAG
TCACCATCACTTGCCAGGCCAGTCAGAGCATTAGTTCCCACTTAAACTGGTATCAGCAGAAACCAGGGAAAGCCCCT
AAGCTCCTGATCTATAAGGCATCCACTCTGGCATCTGGGGTCCCATCAAGGTTCAGCGGCAGTGGATCTGGGACAGA
ATTTACTCTCACCATCAGCAGCCTGCAGCCTGATGATTTTGCAACTTATTACTGCCAACAGGGTTATAGTTGGGGTA
ATGTTGATAATGTTTTCGGCTGCGGGACCAAGGTGGAGATCAAAGGTGGTGGCGGCTCTGGAGGAGGAGGGTCCGGA
CGAGAGGGCCCCGAGCTGTCTCCTGATGACCCAGCAGGCCTCTTGGACTTGCGGCAGGGTATGTTCGCTCAACTTGT
GGCTCAGAATGTTCTGCTCATTGATGGACCACTCTCTTGGTATAGTGACCCCGGTCTGGCCGGGGTGAGTCTGACCG
GCGGGCTCTCTTATAAAGAGGATACTAAGGAACTGGTCGTAGCAAAAGCGGGCGTTTATTACGTTTTTTTTCAGCTG
GAGCTCAGGCGCGTGGTGGCCGGCGAGGGCAGTGGCTCTGTGTCCCTGGCCCTGCACTTACAGCCCTTGAGAAGCGC
TGCAGGTGCTGCCGCACTGGCTTTAACTGTTGACCTCCCTCCGGCCTCTTCTGAAGCTAGAAACAGCGCTTTCGGCT
TCCAAGGGCGCCTGCTGCACCTGAGCGCAGGCCAGCGCTTAGGTGTGCACCTTCATACAGAGGCCAGGGCCCGACAC
GCTTGGCAGCTCACACAGGGTGCCACGGTTCTCGGACTTTTCCGCGTTACTCCCGAGATCCCCGCTGGCCTCGGAAG
TACTGGTTCTGGGTCTAAACCCGGTTCCGGCGAAGGTAGTACTAAAGGACGAGAAGGGCCAGAGTTAAGTCCAGATG
ACCCTGCTGGGCTTTTGGACCTGCGGCAGGGCATGTTCGCTCAACTGGTGGCTCAGAACGTGCTGCTGATCGATGGC
CCCCTGAGTTGGTACAGCGATCCCGGGCTGGCAGGCGTGTCACTTACAGGGGGCCTCTCTTACAAGGAAGACACCAA
GGAGTTAGTGGTCGCTAAGGCTGGCGTGTATTACGTGTTCTTCCAACTGGAGCTGAGAAGGGTTGTGGCAGGAGAGG
GTAGCGGCAGCGTGTCTTTAGCCCTTCACTTGCAGCCCCTGAGGTCTGCTGCAGGTGCAGCCGCTCTCGCGCTCACC
GTGGATCTCCCCCCAGCCTCATCTGAAGCTAGGAACAGTGCATTTGGCTTTCAGGGACGCTTGCTGCACCTCTCCGC
TGGACAGAGGCTGGGCGTGCACCTTCACACAGAGGCCCGTGCCAGGCATGCATGGCAGCTCACTCAGGGGGCAACAG
TGCTGGGTCTCTTCCGCGTGACTCCTGAAATACCAGCTGGACTTGGCGGTGGAGGCAGCGGCGGAGGAGGATCTCGT
GAGGGGCCAGAACTGTCCCCCGATGACCCAGCCGGACTGCTCGATCTCAGACAGGGCATGTTCGCTCAGCTTGTAGC
CCAAAATGTCCTCCTGATTGACGGCCCTTTGAGCTGGTATAGTGATCCCGGCTTGGCCGGGGTATCTCTGACCGGAG
GCCTCTCCTACAAGGAAGACACCAAAGAGCTGGTGGTGGCAAAAGCGGGGGTGTATTATGTGTTCTTTCAGCTCGAG
CTGCGGAGAGTTGTGGCCGGGGAAGGGTCTGGGAGCGTATCTCTTGCACTTCACCTGCAGCCCCTGCGCAGCGCCGC
TGGAGCCGCCGCCCTTGCTCTTACTGTGGATCTGCCTCCTGCTTCCTCAGAAGCACGCAACAGCGCCTTCGGCTTTC
AAGGACGTCTCCTGCACTTGTCCGCAGGACAGAGGTTGGGCGTCCATTTACACACTGAGGCACGGGCACGGCACGCT
TGGCAGCTTACCCAGGGAGCCACCGTGCTGGGACTCTTTAGAGTGACACCCGAGATCCCCGCTGGCTTG
>SEQ ID 82 SI-49P7 chain A aa
EIVMTQSPSTLSASVGDRVIITCQASESISSWLAWYQQKPGKAPKLLIYEASKLASGVPSRFSGSGSGAEFTLTISS
LQPDDFATYYCQGYFYFISRTYVNSFGCGTKLTVLGSTGSGSKPGSGEGSTKGEVQLVESGGGLVQPGGSLRLSCTA
SGFTISTNAMSWVRQAPGKCLEWVGVITGRDITYYASWAKGRFTISRDTSKNTVYLQMNSLRAEDTAVYYCARDGGS
SAITSNNIWGQGTLVTVSTGGGGSGGGGSFLNSLFNQEVQIPLTESYCGPCPKNWICYKNNCYQFFDESKNWYESQA
SCMSQNASLLKVYSKEDQDLLKLVKSYHWMGLVHIPTNGSWQWEDGSILSPNLLTIIEMQKGDCALYASSFKGYIEN
CSTPNTYICMQRTVASTKGPSVFPLAPSSKSTSGGTAALGCLVKDYFPEPVTVSWNSGALTSGVHTFPAVLQSSGLY
SLSSVVTVPSSSLGTQTYICNVNHKPSNTKVDKRVEPKSCDKTHTCPPCPAPEAAGGPSVFLFPPKPKDTLMISRTP
EVTCVVVDVSHEDPEVKFNWYVDGVEVHNAKTKPREEQYASTYRVVSVLTVLHQDWLNGKEYKCAVSNKALPAPIEK
TISKAKGQPREPQVYTLPPSRDELTKNQVSLTCLVKGFYPSDIAVEWESNGQPENNYKTTPPVLDSDGSFFLYSKLT
VDKSRWQQGNVFSCSVMHEALHNHYTQKSLSLSPGGGGGSGGGGSEVQLLESGGGLVQPGGSLRLSCAASGFSFSSG
YDMCWVRQAPGKCLEWIACIAAGSAGITYDANWAKGRFTISRDNSKNTLYLQMNSLRAEDTAVYYCARSAFSFDYAM
DLWGQGTLVTVSSGGGGSGGGGSGGGGSGGGGSDIQMTQSPSTLSASVGDRVTITCQASQSISSHLNWYQQKPGKAP
KLLIYKASTLASGVPSRFSGSGSGTEFTLTISSLQPDDFATYYCQQGYSWGNVDNVFGCGTKVEIKGGGGSGGGGSG
REGPELSPDDPAGLLDLRQGMFAQLVAQNVLLIDGPLSWYSDPGLAGVSLTGGLSYKEDTKELVVAKAGVYYVFFQL
ELRRVVAGEGSGSVSLALHLQPLRSAAGAAALALTVDLPPASSEARNSAFGFQGRLLHLSAGQRLGVHLHTEARARH
AWQLTQGATVLGLFRVTPEIPAGLGSTGSGSKPGSGEGSTKGREGPELSPDDPAGLLDLRQGMFAQLVAQNVLLIDG
PLSWYSDPGLAGVSLTGGLSYKEDTKELVVAKAGVYYVFFQLELRRVVAGEGSGSVSLALHLQPLRSAAGAAALALT
VDLPPASSEARNSAFGFQGRLLHLSAGQRLGVHLHTEARARHAWQLTQGATVLGLFRVTPEIPAGLGGGGSGGGGSR
EGPELSPDDPAGLLDLRQGMFAQLVAQNVLLIDGPLSWYSDPGLAGVSLTGGLSYKEDTKELVVAKAGVYYVFFQLE
LRRVVAGEGSGSVSLALHLQPLRSAAGAAALALTVDLPPASSEARNSAFGFQGRLLHLSAGQRLGVHLHTEARARHA
WQLTQGATVLGLFRVTPEIPAGL
>SEQ ID 83 SI-49P7 chain B nt
GAAAATGTATTGACACAGAGCCCCGCCTCCCTCAGTGCCTCACCTGGGGAAAGGGTAACTATCACTTGCTCTGCATC
AAGCAGCGTCTCATACATGCATTGGTATCAACAAAAGCCTGGACAGGCCCCCAAGCTCTGGATATACGATACGAGCA
AGCTGGCTTCCGGCGTACCTAGCCGCTTCAGTGGTTCCGGCTCAGGCAACGATCACACCCTTACGATTTCCAGTATG
GAACCCGAAGATTTTGCAACTTATTATTGTTTCCAGGGGAGCGTGTACCCATTCACTTTCGGGCAGGGGACAAAATT
GGAGATAAAGGGAAGTACTGGTTCTGGGTCTAAACCCGGTTCCGGCGAAGGTAGTACTAAAGGACAGGTCACATTGA
AGGAATCTGGCCCCGGCCTTGTTCAGCCAGGACAGACCCTTAGGCTCACCTGTGCCTTCAGTGGTTTTTCTCTTAGC
ACTAGCGGTATGGGGGTCGGCTGGATTCGGCAGCCTCCCGGCAAAGGTCTTGAGTGGTTGGCTCACATTTGGTGGGA
CGACGACAAACGGTATAATCCTGCCTTGAAAAGTCGGCTGACCATTAGTAAGGATACCTCAAAAAATCAAGTGTACT
TGCAAATGAATAGCCTTGACGCCGAGGATACGGCTGTATATTATTGCGCGCGGATGGAACTCTGGTCTTACTACTTT
GATTATTGGGGGCAGGGGACTCTCGTCACGGTGTCCTCTGGTGGCGGCGGCTCCGGGGGTGGCGGATCAGGTGGTGG
AGGATCCTTCCTAAACTCATTATTCAACCAAGAAGTTCAAATTCCCTTGACCGAAAGTTACTGTGGCCCATGTCCTA
AAAACTGGATATGTTACAAAAATAACTGCTACCAATTTTTTGATGAGAGTAAAAACTGGTATGAGAGCCAGGCTTCT
TGTATGTCTCAAAATGCCAGCCTTCTGAAAGTATACAGCAAAGAGGACCAGGATTTACTTAAACTGGTGAAGTCATA
TCATTGGATGGGACTAGTACACATTCCAACAAATGGATCTTGGCAGTGGGAAGATGGCTCCATTCTCTCACCCAACC
TACTAACAATAATTGAAATGCAGAAGGGAGACTGTGCACTCTATGCCTCGAGCTTTAAAGGCTATATAGAAAACTGT
TCAACTCCAAATACGTACATCTGCATGCAAAGGACTGTGCGTACGGTGGCTGCACCATCTGTCTTCATCTTCCCGCC
ATCTGATGAGCAGTTGAAATCTGGAACTGCCTCTGTTGTGTGCCTGCTGAATAACTTCTATCCCAGAGAGGCCAAAG
TACAGTGGAAGGTGGATAACGCCCTCCAATCGGGTAACTCCCAGGAGAGTGTCACAGAGCAGGACAGCAAGGACAGC
ACCTACAGCCTCAGCAGCACCCTGACGCTGAGCAAAGCAGACTACGAGAAACACAAAGTCTACGCCTGCGAAGTCAC
CCATCAGGGCCTGAGCTCGCCCGTCACAAAGAGCTTCAACAGGGGAGAGTGT
>SEQ ID 84 SI-49P7 chain B aa
ENVLTQSPASLSASPGERVTITCSASSSVSYMHWYQQKPGQAPKLWIYDTSKLASGVPSRFSGSGSGNDHTLTISSM
EPEDFATYYCFQGSVYPFTFGQGTKLEIKGSTGSGSKPGSGEGSTKGQVTLKESGPGLVQPGQTLRLTCAFSGFSLS
TSGMGVGWIRQPPGKGLEWLAHIWWDDDKRYNPALKSRLTISKDTSKNQVYLQMNSLDAEDTAVYYCARMELWSYYF
DYWGQGTLVTVSSGGGGSGGGGSGGGGSFLNSLFNQEVQIPLTESYCGPCPKNWICYKNNCYQFFDESKNWYESQAS
CMSQNASLLKVYSKEDQDLLKLVKSYHWMGLVHIPTNGSWQWEDGSILSPNLLTIIEMQKGDCALYASSFKGYIENC
STPNTYICMQRTVRTVAAPSVFIFPPSDEQLKSGTASVVCLLNNFYPREAKVQWKVDNALQSGNSQESVTEQDSKDS
TYSLSSTLTLSKADYEKHKVYACEVTHQGLSSPVTKSFNRGEC
>SEQ ID 85 SI-49P10 chain A nt
GAGATCGTGATGACACAATCTCCATCTACGCTCTCCGCCTCAGTGGGCGATAGAGTAATTATTACTTGTCAAGCCTC
AGAGAGCATTTCATCATGGCTCGCCTGGTATCAGCAAAAGCCTGGGAAGGCCCCCAAACTTCTCATCTATGAAGCAT
CAAAGCTGGCCTCTGGGGTTCCGTCTCGCTTCTCCGGGTCCGGCAGTGGTGCAGAGTTTACGTTGACTATATCTTCT
TTGCAACCTGACGATTTCGCAACATATTATTGCCAGGGATACTTTTATTTTATTTCCCGAACATATGTTAACTCTTT
TGGGTGCGGGACCAAACTCACTGTGCTGGGGTCTACCGGTAGTGGTTCTAAGCCTGGTTCAGGCGAAGGCAGTACGA
AAGGGGAAGTGCAACTGGTCGAAAGCGGTGGAGGGCTTGTTCAACCTGGAGGAAGCCTCCGCTTGTCCTGCACGGCT
AGCGGCTTTACAATAAGTACGAACGCCATGAGCTGGGTCCGGCAGGCTCCAGGTAAGTGTCTCGAATGGGTGGGGGT
CATAACAGGCAGGGACATTACCTACTACGCCAGTTGGGCCAAGGGTCGATTTACCATTTCTAGAGATACATCCAAGA
ACACGGTGTACCTCCAGATGAATTCTCTTAGGGCGGAAGACACAGCAGTATACTACTGCGCGCGAGATGGCGGGAGC
AGTGCGATCACATCCAACAACATCTGGGGTCAGGGCACTCTTGTCACGGTGTCGACTGGTGGTGGGGGTAGTGGCGG
CGGAGGTAGCTTTCTTAATTCCCTTTTCAACCAAGAGGTTCAGATCCCCTTGACTGAAAGCTATTGCGGCCCTTGTC
CGAAAAACTGGATATGTTACAAGAATAATTGTTACCAATTCTTCGACGAAAGCAAGAACTGGTATGAGAGTCAGGCG
TCTTGTATGAGTCAGAATGCCAGCCTGCTTAAGGTTTATTCAAAAGAAGACCAGGATCTGCTTAAGTTGGTAAAGAG
CTACCACTGGATGGGGCTGGTACATATCCCAACGAATGGGTCATGGCAGTGGGAGGACGGTTCTATTCTGAGTCCAA
ATCTCCTGACGATCATCGAAATGCAGAAAGGGGACTGTGCCCTGTATGCATCATCCTTCAAGGGGTACATCGAGAAC
TGCAGTACCCCAAATACCTACATTTGTATGCAAAGAACGGTTGCTAGCACCAAGGGCCCATCGGTCTTCCCCCTGGC
ACCCTCCTCCAAGAGCACCTCTGGGGGCACAGCGGCCCTGGGCTGCCTGGTCAAGGACTACTTCCCCGAACCGGTGA
CGGTGTCGTGGAACTCAGGCGCCCTGACCAGCGGCGTGCACACCTTCCCGGCTGTCCTACAGTCCTCAGGACTCTAC
TCCCTCAGCAGCGTGGTGACCGTGCCCTCCAGCAGCTTGGGCACCCAGACCTACATCTGCAACGTGAATCACAAGCC
CAGCAACACCAAGGTGGACAAGAGAGTTGAGCCCAAATCTTGTGACAAAACTCACACATGCCCACCGTGCCCAGCAC
CTGAAGCCGCGGGGGGACCGTCAGTCTTCCTCTTCCCCCCAAAACCCAAGGACACCCTCATGATCTCCCGGACCCCT
GAGGTCACATGCGTGGTGGTGGACGTGAGCCACGAAGACCCTGAGGTCAAGTTCAACTGGTACGTGGACGGCGTGGA
GGTGCATAATGCCAAGACAAAGCCGCGGGAGGAGCAGTACGCCAGCACGTACCGTGTGGTCAGCGTCCTCACCGTCC
TGCACCAGGACTGGCTGAATGGCAAGGAGTACAAGTGCGCGGTCTCCAACAAAGCCCTCCCAGCCCCCATCGAGAAA
ACCATCTCCAAAGCCAAAGGGCAGCCCCGAGAACCACAGGTGTACACCCTGCCCCCATCCCGGGATGAGCTGACCAA
GAACCAGGTCAGCCTGACCTGCCTGGTCAAAGGCTTCTATCCCAGCGACATCGCCGTGGAGTGGGAGAGCAATGGGC
AGCCGGAGAACAACTACAAGACCACGCCTCCCGTGCTGGACTCCGACGGCTCCTTCTTCCTCTATAGCAAGCTCACC
GTGGACAAGAGCAGGTGGCAGCAGGGGAACGTCTTCTCATGCTCCGTGATGCATGAGGCTCTGCACAACCACTACAC
GCAGAAGAGCCTCTCCCTGTCTCCGGGTGGCGGTGGAGGGTCCGGCGGTGGTGGATCCGAGGTGCAGCTGTTGGAGT
CTGGGGGAGGCTTGGTACAGCCTGGGGGGTCCCTGAGACTCTCCTGTGCAGCCTCTGGATTCTCCTTCAGTAGCGGG
TACGACATGTGCTGGGTCCGCCAGGCTCCAGGGAAGTGCCTGGAGTGGATCGCATGCATTGCTGCTGGTAGTGCTGG
TATCACTTACGACGCGAACTGGGCGAAAGGCCGGTTCACCATCTCCAGAGACAATTCCAAGAACACGCTGTATCTGC
AAATGAACAGCCTGAGAGCCGAGGACACGGCCGTATATTACTGTGCGAGATCGGCGTTTTCGTTCGACTACGCCATG
GACCTCTGGGGCCAGGGAACCCTGGTCACCGTCTCGAGCGGTGGAGGCGGTTCAGGCGGAGGTGGAAGTGGTGGTGG
CGGCTCTGGAGGCGGCGGATCTGACATCCAGATGACCCAGTCTCCTTCCACCCTGTCTGCATCTGTAGGAGACAGAG
TCACCATCACTTGCCAGGCCAGTCAGAGCATTAGTTCCCACTTAAACTGGTATCAGCAGAAACCAGGGAAAGCCCCT
AAGCTCCTGATCTATAAGGCATCCACTCTGGCATCTGGGGTCCCATCAAGGTTCAGCGGCAGTGGATCTGGGACAGA
ATTTACTCTCACCATCAGCAGCCTGCAGCCTGATGATTTTGCAACTTATTACTGCCAACAGGGTTATAGTTGGGGTA
ATGTTGATAATGTTTTCGGCTGCGGGACCAAGGTGGAGATCAAAGGTGGTGGCGGCTCTGGAGGAGGAGGGTCCGGA
CGGTCGCTGGTGGAGTCTGGGGGAGGCTTGGTCCAGCCTGGGGGGTCCCTGAGACTCTCCTGTACTGCCTCTGGATT
CACCATCAGTAGCTACCACATGCAGTGGGTCCGGCAGGCACCTGGGAAGTGCCTGGAGTACATCGGAACCATTAGTA
GTGGTGGTAATGTATACTACGCAAGCTCCGCTAGAGGCAGATTCACCATCTCCAGACCCTCGTCCAAGAACACGGTG
GATCTTCAAATGAACAGCCTGAGAGCCGAGGACACGGCTGTGTATTACTGTGCGAGAGACTCTGGTTATAGTGATCC
TATGTGGGGCCAGGGAACCCTGGTCACCGTCTCTTCAGGCGGTGGCGGTAGTGGGGGAGGCGGTTCTGGCGGCGGAG
GGTCCGGCGGTGGAGGATCAGACGTTGTGATGACCCAGTCTCCATCTTCCGTGTCTGCATCTGTAGGAGACAGAGTC
ACCATCACCTGTCAGGCCAGTCAGAACATTAGGACTTACTTATCCTGGTATCAGCAGAAACCAGGGAAAGCCCCTAA
GCTCCTGATCTATGCTGCAGCCAATCTGGCATCTGGGGTCCCATCAAGGTTCAGCGGCAGTGGATCTGGGACAGATT
TCACTCTCACCATCAGCGACTTGGAACCTGGCGATGCTGCAACTTACTATTGTCAGTCTACCTATCTTGGTACTGAT
TATGTTGGCGGTGCTTTCGGCTGTGGGACCAAGGTGGAGATCAAA
>SEQ ID 86 SI-49P10 chain A aa
EIVMTQSPSTLSASVGDRVIITCQASESISSWLAWYQQKPGKAPKLLIYEASKLASGVPSRFSGSGSGAEFTLTISS
LQPDDFATYYCQGYFYFISRTYVNSFGCGTKLTVLGSTGSGSKPGSGEGSTKGEVQLVESGGGLVQPGGSLRLSCTA
SGFTISTNAMSWVRQAPGKCLEWVGVITGRDITYYASWAKGRFTISRDTSKNTVYLQMNSLRAEDTAVYYCARDGGS
SAITSNNIWGQGTLVTVSTGGGGSGGGGSFLNSLFNQEVQIPLTESYCGPCPKNWICYKNNCYQFFDESKNWYESQA
SCMSQNASLLKVYSKEDQDLLKLVKSYHWMGLVHIPTNGSWQWEDGSILSPNLLTIIEMQKGDCALYASSFKGYIEN
CSTPNTYICMQRTVASTKGPSVFPLAPSSKSTSGGTAALGCLVKDYFPEPVTVSWNSGALTSGVHTFPAVLQSSGLY
SLSSVVTVPSSSLGTQTYICNVNHKPSNTKVDKRVEPKSCDKTHTCPPCPAPEAAGGPSVFLFPPKPKDTLMISRTP
EVTCVVVDVSHEDPEVKFNWYVDGVEVHNAKTKPREEQYASTYRVVSVLTVLHQDWLNGKEYKCAVSNKALPAPIEK
TISKAKGQPREPQVYTLPPSRDELTKNQVSLTCLVKGFYPSDIAVEWESNGQPENNYKTTPPVLDSDGSFFLYSKLT
VDKSRWQQGNVFSCSVMHEALHNHYTQKSLSLSPGGGGGSGGGGSEVQLLESGGGLVQPGGSLRLSCAASGFSFSSG
YDMCWVRQAPGKCLEWIACIAAGSAGITYDANWAKGRFTISRDNSKNTLYLQMNSLRAEDTAVYYCARSAFSFDYAM
DLWGQGTLVTVSSGGGGSGGGGSGGGGSGGGGSDIQMTQSPSTLSASVGDRVTITCQASQSISSHLNWYQQKPGKAP
KLLIYKASTLASGVPSRFSGSGSGTEFTLTISSLQPDDFATYYCQQGYSWGNVDNVFGCGTKVEIKGGGGSGGGGSG
RSLVESGGGLVQPGGSLRLSCTASGFTISSYHMQWVRQAPGKCLEYIGTISSGGNVYYASSARGRFTISRPSSKNTV
DLQMNSLRAEDTAVYYCARDSGYSDPMWGQGTLVTVSSGGGGSGGGGSGGGGSGGGGSDVVMTQSPSSVSASVGDRV
TITCQASQNIRTYLSWYQQKPGKAPKLLIYAAANLASGVPSRFSGSGSGTDFTLTISDLEPGDAATYYCQSTYLGTD
YVGGAFGCGTKVEIK
>SEQ ID 87 SI-49P10 chain B nt
GACATCCAGATGACCCAGTCTCCATCCTCCCTGTCTGCATCTGTAGGAGACAGAGTCACCATCACTTGCCAGGCGAG
TCAGGACATCAGCAACTATTTAAATTGGTATCAGCAGAAACCAGGGAAAGCCCCTAAACTCCTGATCTACGATGCAT
CCAATTTGGAAACAGGGGTCCCATCAAGGTTCAGTGGAAGTGGATCTGGGACAGATTTTACTTTCACCATCAGCAGC
CTGCAGCCTGAAGATATTGCAACATATTTCTGTCAACACTTTGATCATCTCCCGCTCGCTTTCGGCGGAGGGACCAA
GGTGGAAATTAAAGGAAGTACTGGTTCTGGGTCTAAACCCGGTTCCGGCGAAGGTAGTACTAAAGGACAGGTGCAGC
TGCAGGAGTCGGGCCCAGGACTGGTGAAGCCTTCGGAGACCCTGTCCCTCACCTGCACTGTCTCTGGTGGCTCCGTC
AGCAGTGGTGATTACTACTGGACCTGGATCCGGCAGTCCCCAGGGAAGGGACTGGAGTGGATTGGACACATCTATTA
CAGTGGGAACACCAATTATAACCCCTCCCTCAAGAGCCGACTCACCATATCAATTGACACGTCCAAGACTCAGTTCT
CCCTGAAGCTGAGTTCTGTGACCGCTGCGGACACGGCCATTTATTACTGTGTGCGAGATCGAGTGACTGGTGCTTTT
GATATCTGGGGCCAAGGGACAATGGTCACCGTCTCGAGCGGTGGCGGCGGCTCCGGGGGTGGCGGATCAGGTGGTGG
AGGCTCTTTCCTAAACTCATTATTCAACCAAGAAGTTCAAATTCCCTTGACCGAAAGTTACTGTGGCCCATGTCCTA
AAAACTGGATATGTTACAAAAATAACTGCTACCAATTTTTTGATGAGAGTAAAAACTGGTATGAGAGCCAGGCTTCT
TGTATGTCTCAAAATGCCAGCCTTCTGAAAGTATACAGCAAAGAGGACCAGGATTTACTTAAACTGGTGAAGTCATA
TCATTGGATGGGACTAGTACACATTCCAACAAATGGATCTTGGCAGTGGGAAGATGGCTCCATTCTCTCACCCAACC
TACTAACAATAATTGAAATGCAGAAGGGAGACTGTGCACTCTATGCCTCGAGCTTTAAAGGCTATATAGAAAACTGT
TCAACTCCAAATACGTACATCTGCATGCAAAGGACTGTGCGTACGGTGGCTGCACCATCTGTCTTCATCTTCCCGCC
ATCTGATGAGCAGTTGAAATCTGGAACTGCCTCTGTTGTGTGCCTGCTGAATAACTTCTATCCCAGAGAGGCCAAAG
TACAGTGGAAGGTGGATAACGCCCTCCAATCGGGTAACTCCCAGGAGAGTGTCACAGAGCAGGACAGCAAGGACAGC
ACCTACAGCCTCAGCAGCACCCTGACGCTGAGCAAAGCAGACTACGAGAAACACAAAGTCTACGCCTGCGAAGTCAC
CCATCAGGGCCTGAGCTCGCCCGTCACAAAGAGCTTCAACAGGGGAGAGTGT
>SEQ ID 88 SI-49P10 chain B aa
DIQMTQSPSSLSASVGDRVTITCQASQDISNYLNWYQQKPGKAPKLLIYDASNLETGVPSRFSGSGSGTDFTFTISS
LQPEDIATYFCQHFDHLPLAFGGGTKVEIKGSTGSGSKPGSGEGSTKGQVQLQESGPGLVKPSETLSLTCTVSGGSV
SSGDYYWTWIRQSPGKGLEWIGHIYYSGNTNYNPSLKSRLTISIDTSKTQFSLKLSSVTAADTAIYYCVRDRVTGAF
DIWGQGTMVTVSSGGGGSGGGGSGGGGSFLNSLFNQEVQIPLTESYCGPCPKNWICYKNNCYQFFDESKNWYESQAS
CMSQNASLLKVYSKEDQDLLKLVKSYHWMGLVHIPTNGSWQWEDGSILSPNLLTIIEMQKGDCALYASSFKGYIENG
STPNTYICMQRTVRTVAAPSVFIFPPSDEQLKSGTASVVCLLNNFYPREAKVQWKVDNALQSGNSQESVTEQDSKDS
TYSLSSTLTLSKADYEKHKVYACEVTHQGLSSPVTKSFNRGEC
>SEQ ID 97 SI-38E17 chain A nt
GACGTCGTGATGACCCAGTCTCCTTCCACCCTGTCTGCATCTGTAGGAGACAGAGTCACCATCAATTGCCAAGCCAG
TGAGAGCATTAGCAGTTGGTTAGCCTGGTATCAGCAGAAACCAGGGAAAGCCCCTAAGCTCCTGATCTATGAAGCAT
CCAAACTGGCATCTGGGGTCCCATCAAGGTTCAGCGGCAGTGGATCTGGGACAGAGTTCACTCTCACCATCAGCAGC
CTGCAGCCTGATGATTTTGCAACTTATTACTGCCAAGGCTATTTTTATTTTATTAGTCGTACTTATGTAAATTCTTT
CGGCGGAGGGACCAAGGTGGAGATCAAAGGCGGTGGCGGTAGTGGGGGAGGCGGTTCTGGCGGCGGAGGGTCCGGCG
GTGGAGGATCAGAGGTGCAGCTGGTGGAGTCTGGGGGAGGCTTGGTCCAGCCTGGGGGGTCCCTGAGACTCTCCTGT
GCAGCCTCTGGATTCACCATCAGTACCAATGCAATGAGCTGGGTCCGCCAGGCTCCAGGGAAGGGGCTGGAGTGGAT
CGGAGTCATTACTGGTCGTGATATCACATACTACGCGAGCTGGGCGAAAGGCAGATTCACCATCTCCAGAGACAATT
CCAAGAACACGCTGTATCTTCAAATGAACAGCCTGAGAGCCGAGGACACGGCTGTGTATTACTGTGCGCGCGACGGT
GGATCATCTGCTATTACTAGTAACAACATTTGGGGCCAAGGAACTCTGGTCACCGTTTCTTCAGGCGGTGGAGGGTC
CGGCGGTGGTGGATCCGAGGTGCAGCTGGTGCAGTCTGGAGCAGAGGTGAAGAAACCAGGAGAGTCTCTGAAGATCT
CCTGTAAGGGTTCTGGATACAGCTTTAGCAGTTCATGGATCGGCTGGGTGCGCCAGGCACCTGGGAAAGGCCTGGAA
TGGATGGGGATCATCTATCCTGATGACTCTGATACCAGATACAGTCCATCCTTCCAAGGCCAGGTCACCATCTCAGC
CGACAAGTCCATCAGGACTGCCTACCTGCAGTGGAGTAGCCTGAAGGCCTCGGACACCGCTATGTATTACTGTGCGA
GACATGTTACTATGATTTGGGGAGTTATTATTGACTTCTGGGGCCAGGGAACCCTGGTCACCGTCTCCTCAGCTAGC
ACCAAGGGCCCATCGGTCTTCCCCCTGGCACCCTCCTCCAAGAGCACCTCTGGGGGCACAGCGGCCCTGGGCTGCCT
GGTCAAGGACTACTTCCCCGAACCGGTGACGGTGTCGTGGAACTCAGGCGCCCTGACCAGCGGCGTGCACACCTTCC
CGGCTGTCCTACAGTCCTCAGGACTCTACTCCCTCAGCAGCGTGGTGACCGTGCCCTCCAGCAGCTTGGGCACCCAG
ACCTACATCTGCAACGTGAATCACAAGCCCAGCAACACCAAGGTGGACAAGAGAGTTGAGCCCAAATCTTGTGACAA
AACTCACACATGCCCACCGTGCCCAGCACCTGAAGCCGCGGGGGCACCGTCAGTCTTCCTCTTCCCCCCAAAACCCA
AGGACACCCTCATGATCTCCCGGACCCCTGAGGTCACATGCGTGGTGGTGGACGTGAGCCACGAAGACCCTGAGGTC
AAGTTCAACTGGTACGTGGACGGCGTGGAGGTGCATAATGCCAAGACAAAGCCGCGGGAGGAGCAGTACAACAGCAC
GTACCGTGTGGTCAGCGTCCTCACCGTCCTGCACCAGGACTGGCTGAATGGCAAGGAGTACAAGTGCGCGGTCTCCA
ACAAAGCCCTCCCAGCCCCCATCGAGAAAACCATCTCCAAAGCCAAAGGGCAGCCCCGAGAACCACAGGTGTATACC
CTGCCCCCATCCCGGGATGAGCTGACCAAGAACCAGGTCAGCCTGACCTGCCTGGTCAAAGGCTTCTATCCCAGCGA
CATCGCCGTGGAGTGGGAGAGCAATGGGCAGCCGGAGAACAACTACAAGACCACGCCTCCCGTGCTGGACTCCGACG
GCTCCTTCTTCCTCTATAGCAAGCTCACCGTGGACAAGAGCAGGTGGCAGCAGGGGAACGTCTTCTCATGCTCCGTG
ATGCATGAGGCTCTGCACAACCACTACACGCAGAAGAGCCTCTCCCTGTCTCCGGGTGGCGGTGGAGGGTCCGGCGG
TGGTGGATCCGAGGTGCAGCTGTTGGAGTCTGGGGGAGGCTTGGTACAGCCTGGGGGGTCCCTGAGACTCTCCTGTG
CAGCCTCTGGATTCTCCTTCAGTAGCGGGTACGACATGTGCTGGGTCCGCCAGGCTCCAGGGAAGGGGCTGGAGTGG
ATCGCATGCATTGCTGCTGGTAGTGCTGGTATCACTTACGACGCGAACTGGGCGAAAGGCCGGTTCACCATCTCCAG
AGACAATTCCAAGAACACGCTGTATCTGCAAATGAACAGCCTGAGAGCCGAGGACACGGCCGTATATTACTGTGCGA
GATCGGCGTTTTCGTTCGACTACGCCATGGACCTCTGGGGCCAGGGAACCCTGGTCACCGTCTCGAGCGGTGGAGGC
GGATCTGGCGGAGGTGGTTCCGGCGGTGGCGGCTCCGGTGGAGGCGGCTCTGACATCCAGATGACCCAGTCTCCTTC
CACCCTGTCTGCATCTGTAGGAGACAGAGTCACCATCACTTGCCAGGCCAGTCAGAGCATTAGTTCCCACTTAAACT
GGTATCAGCAGAAACCAGGGAAAGCCCCTAAGCTCCTGATCTATAAGGCATCCACTCTGGCATCTGGGGTCCCATCA
AGGTTCAGCGGCAGTGGATCTGGGACAGAATTTACTCTCACCATCAGCAGCCTGCAGCCTGATGATTTTGCAACTTA
TTACTGCCAACAGGGTTATAGTTGGGGTAATGTTGATAATGTTTTCGGCGGAGGGACCAAGGTGGAGATCAAAGGCG
GTGGAGGGTCCGGCGGTGGTGGATCCCGGTCGCTGGTGGAGTCTGGGGGAGGCTTGGTCCAGCCTGGGGGGTCCCTG
AGACTCTCCTGTACAGCCTCTGGATTCACCATCAGTAGCTACCACATGCAGTGGGTCCGCCAGGCTCCAGGGAAGGG
GCTGGAGTACATCGGAACCATTAGTAGTGGTGGTAATGTATACTACGCGAGCTCCGCGAGAGGCAGATTCACCATCT
CCAGACCCTCGTCCAAGAACACGGTGGATCTTCAAATGAACAGCCTGAGAGCCGAGGACACGGCTGTGTATTACTGT
GCGAGAGACTCTGGTTATAGTGATCCTATGTGGGGCCAGGGAACCCTGGTCACCGTCTCGAGCGGCGGTGGCGGTAG
TGGGGGAGGCGGTTCTGGCGGCGGAGGGTCCGGCGGTGGAGGATCAGACGTTGTGATGACCCAGTCTCCATCTTCCG
TGTCTGCATCTGTAGGAGACAGAGTCACCATCACCTGTCAGGCCAGTCAGAACATTAGGACTTACTTATCCTGGTAT
CAGCAGAAACCAGGGAAAGCCCCTAAGCTCCTGATCTATGCTGCAGCCAATCTGGCATCTGGGGTCCCATCAAGGTT
CAGCGGCAGTGGATCTGGGACAGATTTCACTCTCACCATCAGCGACCTGGAGCCTGGCGATGCTGCAACTTACTATT
GTCAGTCTACCTATCTTGGTACTGATTATGTTGGCGGTGCTTTCGGCGGAGGGACCAAGGTGGAGATCAAATAA
>SEQ ID 98 SI-38E17 chain A aa
DVVMTQSPSTLSASVGDRVTINCQASESISSWLAWYQQKPGKAPKLLIYEASKLASGVPSRFSGSGSGTEFTLTISS
LQPDDFATYYCQGYFYFISRTYVNSFGGGTKVEIKGGGGSGGGGSGGGGSGGGGSEVQLVESGGGLVQPGGSLRLSC
AASGFTISTNAMSWVRQAPGKGLEWIGVITGRDITYYASWAKGRFTISRDNSKNTLYLQMNSLRAEDTAVYYCARDG
GSSAITSNNIWGQGTLVTVSSGGGGSGGGGSEVQLVQSGAEVKKPGESLKISCKGSGYSFSSSWIGWVRQAPGKGLE
WMGIIYPDDSDTRYSPSFQGQVTISADKSIRTAYLQWSSLKASDTAMYYCARHVTMIWGVIIDFWGQGTLVTVSSAS
TKGPSVFPLAPSSKSTSGGTAALGCLVKDYFPEPVTVSWNSGALTSGVHTFPAVLQSSGLYSLSSVVTVPSSSLGTQ
TYICNVNHKPSNTKVDKRVEPKSCDKTHTCPPCPAPEAAGAPSVFLFPPKPKDTLMISRTPEVTCVVVDVSHEDPEV
KFNWYVDGVEVHNAKTKPREEQYNSTYRVVSVLTVLHQDWLNGKEYKCAVSNKALPAPIEKTISKAKGQPREPQVYT
LPPSRDELTKNQVSLTCLVKGFYPSDIAVEWESNGQPENNYKTTPPVLDSDGSFFLYSKLTVDKSRWQQGNVFSCSV
MHEALHNHYTQKSLSLSPGGGGGSGGGGSEVQLLESGGGLVQPGGSLRLSCAASGFSFSSGYDMCWVRQAPGKGLEW
IACIAAGSAGITYDANWAKGRFTISRDNSKNTLYLQMNSLRAEDTAVYYCARSAFSFDYAMDLWGQGTLVTVSSGGG
GSGGGGSGGGGSGGGGSDIQMTQSPSTLSASVGDRVTITCQASQSISSHLNWYQQKPGKAPKLLIYKASTLASGVPS
RFSGSGSGTEFTLTISSLQPDDFATYYCQQGYSWGNVDNVFGGGTKVEIKGGGGSGGGGSRSLVESGGGLVQPGGSL
RLSCTASGFTISSYHMQWVRQAPGKGLEYIGTISSGGNVYYASSARGRFTISRPSSKNTVDLQMNSLRAEDTAVYYC
ARDSGYSDPMWGQGTLVTVSSGGGGSGGGGSGGGGSGGGGSDVVMTQSPSSVSASVGDRVTITCQASQNIRTYLSWY
QQKPGKAPKLLIYAAANLASGVPSRFSGSGSGTDFTLTISDLEPGDAATYYCQSTYLGTDYVGGAFGGGTKVEIK
>SEQ ID 99 SI-38E17 chain B nt
GCCATCCAGTTGACCCAGTCTCCATCCTCCCTGTCTGCATCTGTAGGAGACAGAGTCACCATCACTTGCCGGGCAAG
TCAGGGCATTAGCAGTGCTTTAGCCTGGTATCAGCAGAAACCAGGGAAAGCTCCTAAGCTCCTGATCTATGATGCCT
CCAGTTTGGAAAGTGGGGTCCCATCAAGGTTCAGCGGCAGTGGATCTGGGACAGATTTCACTCTCACCATCAGCAGC
CTGCAGCCTGAAGATTTTGCAACTTATTACTGTCAACAGTTTAATAGTTACCCATTCACTTTCGGCCCTGGGACCAA
AGTGGATATCAAACGTACGGTGGCTGCACCATCTGTCTTCATCTTCCCGCCATCTGATGAGCAGTTGAAATCTGGAA
CTGCCTCTGTTGTGTGCCTGCTGAATAACTTCTATCCCAGAGAGGCCAAAGTACAGTGGAAGGTGGATAACGCCCTC
CAATCGGGTAACTCCCAGGAGAGTGTCACAGAGCAGGACAGCAAGGACAGCACCTACAGCCTCAGCAGCACCCTGAC
GCTGAGCAAAGCAGACTACGAGAAACACAAAGTCTACGCCTGCGAAGTCACCCATCAGGGCCTGAGCTCGCCCGTCA
CAAAGAGCTTCAACAGGGGAGAGTGTTAG
>SEQ ID 100 SI-38E17 chain B aa
AIQLTQSPSSLSASVGDRVTITCRASQGISSALAWYQQKPGKAPKLLIYDASSLESGVPSRFSGSGSGTDFTLTISS
LQPEDFATYYCQQFNSYPFTFGPGTKVDIKRTVAAPSVFIFPPSDEQLKSGTASVVCLLNNFYPREAKVQWKVDNAL
QSGNSQESVTEQDSKDSTYSLSSTLTLSKADYEKHKVYACEVTHQGLSSPVTKSFNRGEC
>SEQ ID 105 SI-55H11 chain A nt
GAAATCGTCCTTACACAATCTCCTAGCACACTGAGTGTGAGCCCCGGCGAACGCGCGACTTTCTCTTGCAGGGCAAG
TCAATCCATAGGGACTAATATACATTGGTATCAACAAAAGCCAGGTAAACCACCCAGGCTTTTGATTAAGTATGCAA
GTGAGTCTATTTCCGGTATCCCTGACCGCTTCTCTGGATCAGGCAGTGGCACAGAGTTCACACTCACCATATCTAGT
GTGCAATCAGAGGACTTCGCCGTGTATTACTGCCAACAGAATAATAACTGGCCGACTACCTTCGGACCCGGTACAAA
GCTGACCGTTTTAGGCGGTGGCGGTAGTGGGGGAGGCGGTTCTGGCGGCGGAGGGTCCGGCGGTGGAGGATCACAAG
TACAGTTGCAGCAATCCGGTCCCGGTCTCGTCAAACCGAGTGAGACGCTTAGTATAACGTGTACTGTTTCAGGCTTT
AGCCTTACGAACTATGGAGTTCACTGGATTCGGCAGGCACCCGGCAAAGGTTTGGAATGGCTGGGTGTTATTTGGTC
AGGTGGAAATACAGACTATAACACCCCCTTTACAAGTCGGTTCACAATTACGAAAGATAATTCCAAAAATCAAGTTT
ATTTCAAGTTGAGATCCGTCCGCGCGGACGACACTGCGATCTACTATTGTGCGAGGGCACTGACCTACTACGATTAC
GAATTTGCGTATTGGGGGCAAGGGACTCTTGTAACAGTCTCGAGCGGTGGAGGCGGATCTGGCGGAGGTGGTTCCGG
CGGTGGCGGCTCCGGTGGAGGCGGCTCTGAGGTGCAGCTGGTGGAGTCTGGGGGAGGCTTGGTCCAGCCTGGGGGGT
CCCTGAGACTCTCCTGTGCAGCCTCTGGATTCACCATCAGTACCAATGCAATGAGCTGGGTCCGCCAGGCTCCAGGG
AAGTGTCTGGAGTGGATCGGAGTCATTACTGGTCGTGATATCACATACTACGCGAGCTGGGCGAAAGGCAGATTCAC
CATCTCCAGAGACAATTCCAAGAACACGCTGTATCTTCAAATGAACAGCCTGAGAGCCGAGGACACGGCTGTGTATT
ACTGTGCGAGAGACGGTGGTTCTTCTGCTATTACTAGTAACAACATTTGGGGCCAGGGAACCCTGGTCACCGTGTCC
TCAGCTAGCACCAAGGGCCCATCGGTCTTCCCCCTGGCACCCTCCTCCAAGAGCACCTCTGGGGGCACAGCGGCCCT
GGGCTGCCTGGTCAAGGACTACTTCCCCGAACCGGTGACGGTGTCGTGGAACTCAGGCGCCCTGACCAGCGGCGTGC
ACACCTTCCCGGCTGTCCTACAGTCCTCAGGACTCTACTCCCTCAGCAGCGTGGTGACCGTGCCCTCCAGCAGCTTG
GGCACCCAGACCTACATCTGCAACGTGAATCACAAGCCCAGCAACACCAAGGTGGACAAGAGAGTTGAGCCCAAATC
TTGTGACAAAACTCACACATGCCCACCGTGCCCAGCACCTGAAGCCGCGGGGGCACCGTCAGTCTTCCTCTTCCCCC
CAAAACCCAAGGACACCCTCATGATCTCCCGGACCCCTGAGGTCACATGCGTGGTGGTGGACGTGAGCCACGAAGAC
CCTGAGGTCAAGTTCAACTGGTACGTGGACGGCGTGGAGGTGCATAATGCCAAGACAAAGCCGCGGGAGGAGCAGTA
CAACAGCACGTACCGTGTGGTCAGCGTCCTCACCGTCCTGCACCAGGACTGGCTGAATGGCAAGGAGTACAAGTGCG
CGGTCTCCAACAAAGCCCTCCCAGCCCCCATCGAGAAAACCATCTCCAAAGCCAAAGGGCAGCCCCGAGAACCACAG
GTGTACACCCTGCCCCCATCCCGGGATGAGCTGACCAAGAACCAGGTCAGCCTGACCTGCCTGGTCAAAGGCTTCTA
TCCCAGCGACATCGCCGTGGAGTGGGAGAGCAATGGGCAGCCGGAGAACAACTACAAGACCACGCCTCCCGTGCTGG
ACTCCGACGGCTCCTTCTTCCTCTATAGCAAGCTCACCGTGGACAAGAGCAGGTGGCAGCAGGGGAACGTCTTCTCA
TGCTCCGTGATGCATGAGGCTCTGCACAACCACTACACGCAGAAGAGCCTCTCCCTGTCTCCGGGTGGCGGTGGAGG
GTCCGGCGGTGGTGGATCCGAGGTGCAGCTGTTGGAGTCTGGGGGAGGCTTGGTACAGCCTGGGGGGTCCCTGAGAC
TCTCCTGTGCAGCCTCTGGATTCTCCTTCAGTAGCGGGTACGACATGTGCTGGGTCCGCCAGGCTCCAGGGAAGGGG
CTGGAGTGGATCGCATGCATTGCTGCTGGTAGTGCTGGTATCACTTACGACGCGAACTGGGCGAAAGGCCGGTTCAC
CATCTCCAGAGACAATTCCAAGAACACGCTGTATCTGCAAATGAACAGCCTGAGAGCCGAGGACACGGCCGTATATT
ACTGTGCGAGATCGGCGTTTTCGTTCGACTACGCCATGGACCTCTGGGGCCAGGGAACCCTGGTCACCGTGTCGAGC
GGTGGAGGCGGATCTGGCGGAGGTGGTTCCGGCGGTGGCGGCTCCGGTGGAGGCGGCTCTGACATCCAGATGACCCA
GTCTCCTTCCACCCTGTCTGCATCTGTAGGAGACAGAGTCACCATCACTTGCCAGGCCAGTCAGAGCATTAGTTCCC
ACTTAAACTGGTATCAGCAGAAACCAGGGAAAGCCCCTAAGCTCCTGATCTATAAGGCATCCACTCTGGCATCTGGG
GTCCCATCAAGGTTCAGCGGCAGTGGATCTGGGACAGAATTTACTCTCACCATCAGCAGCCTGCAGCCTGATGATTT
TGCAACTTATTACTGCCAACAGGGTTATAGTTGGGGTAATGTTGATAATGTTTTCGGCGGAGGGACCAAGGTGGAGA
TCAAAGGCGGTGGAGGGTCCGGCGGTGGTGGCTCCGGACGGTCGCTGGTGGAGTCTGGGGGAGGCTTGGTCCAGCCT
GGGGGGTCCCTGAGACTCTCCTGTACTGCCTCTGGATTCACCATCAGTAGCTACCACATGCAGTGGGTCCGCCAGGC
TCCAGGGAAGGGGCTGGAGTACATCGGAACCATTAGTAGTGGTGGTAATGTATACTACGCAAGCTCCGCTAGAGGCA
GATTCACCATCTCCAGACCCTCGTCCAAGAACACGGTGGATCTTCAAATGAACAGCCTGAGAGCCGAGGACACGGCT
GTGTATTACTGTGCGAGAGACTCTGGTTATAGTGATCCTATGTGGGGCCAGGGAACCCTGGTCACCGTCTCTTCAGG
CGGTGGCGGTAGTGGGGGAGGCGGTTCTGGCGGCGGAGGGTCCGGCGGTGGAGGATCAGACGTTGTGATGACCCAGT
CTCCATCTTCCGTGTCTGCATCTGTAGGAGACAGAGTCACCATCACCTGTCAGGCCAGTCAGAACATTAGGACTTAC
TTATCCTGGTATCAGCAGAAACCAGGGAAAGCCCCTAAGCTCCTGATCTATGCTGCAGCCAATCTGGCATCTGGGGT
CCCATCAAGGTTCAGCGGCAGTGGATCTGGGACAGATTTCACTCTCACCATCAGCGACCTGGAGCCTGGCGATGCTG
CAACTTACTATTGTCAGTCTACCTATCTTGGTACTGATTATGTTGGCGGTGCTTTCGGCGGAGGGACCAAGGTGGAG
ATCAAATGA
>SEQ ID 106 SI-55H11 chain A aa
EIVLTQSPSTLSVSPGERATFSCRASQSIGTNIHWYQQKPGKPPRLLIKYASESISGIPDRFSGSGSGTEFTLTISS
VQSEDFAVYYCQQNNNWPTTFGPGTKLTVLGGGGSGGGGSGGGGSGGGGSQVQLQQSGPGLVKPSETLSITCTVSGF
SLTNYGVHWIRQAPGKGLEWLGVIWSGGNTDYNTPFTSRFTITKDNSKNQVYFKLRSVRADDTAIYYCARALTYYDY
EFAYWGQGTLVTVSSGGGGSGGGGSGGGGSGGGGSEVQLVESGGGLVQPGGSLRLSCAASGFTISTNAMSWVRQAPG
KCLEWIGVITGRDITYYASWAKGRFTISRDNSKNTLYLQMNSLRAEDTAVYYCARDGGSSAITSNNIWGQGTLVTVS
SASTKGPSVFPLAPSSKSTSGGTAALGCLVKDYFPEPVTVSWNSGALTSGVHTFPAVLQSSGLYSLSSVVTVPSSSL
GTQTYICNVNHKPSNTKVDKRVEPKSCDKTHTCPPCPAPEAAGAPSVFLFPPKPKDTLMISRTPEVTCVVVDVSHED
PEVKFNWYVDGVEVHNAKTKPREEQYNSTYRVVSVLTVLHQDWLNGKEYKCAVSNKALPAPIEKTISKAKGQPREPQ
VYTLPPSRDELTKNQVSLTCLVKGFYPSDIAVEWESNGQPENNYKTTPPVLDSDGSFFLYSKLTVDKSRWQQGNVFS
CSVMHEALHNHYTQKSLSLSPGGGGGSGGGGSEVQLLESGGGLVQPGGSLRLSCAASGFSFSSGYDMCWVRQAPGKG
LEWIACIAAGSAGITYDANWAKGRFTISRDNSKNTLYLQMNSLRAEDTAVYYCARSAFSFDYAMDLWGQGTLVTVSS
GGGGSGGGGSGGGGSGGGGSDIQMTQSPSTLSASVGDRVTITCQASQSISSHLNWYQQKPGKAPKLLIYKASTLASG
VPSRFSGSGSGTEFTLTISSLQPDDFATYYCQQGYSWGNVDNVFGGGTKVEIKGGGGSGGGGSGRSLVESGGGLVQP
GGSLRLSCTASGFTISSYHMQWVRQAPGKGLEYIGTISSGGNVYYASSARGRFTISRPSSKNTVDLQMNSLRAEDTA
VYYCARDSGYSDPMWGQGTLVTVSSGGGGSGGGGSGGGGSGGGGSDVVMTQSPSSVSASVGDRVTITCQASQNIRTY
LSWYQQKPGKAPKLLIYAAANLASGVPSRFSGSGSGTDFTLTISDLEPGDAATYYCQSTYLGTDYVGGAFGGGTKVE
IK
>SEQ ID 107 SI-55H11 chain B nt
GAAAATGTATTGACACAGAGCCCCGCCTCCCTCAGTGCCTCACCTGGGGAAAGGGTAACTATCACTTGCTCTGCATC
AAGCAGCGTCTCATACATGCATTGGTATCAACAAAAGCCTGGACAGGCCCCCAAGCTCTGGATATACGATACGAGCA
AGCTGGCTTCCGGCGTACCTAGCCGCTTCAGTGGTTCCGGCTCAGGCAACGATCACACCCTTACGATTTCCAGTATG
GAACCCGAAGATTTTGCAACTTATTATTGTTTCCAGGGGAGCGTGTACCCATTCACTTTCGGGCAGGGGACAAAAGT
GACCGTCCTAGGCGGTGGCGGTAGTGGGGGAGGCGGTTCTGGCGGCGGAGGGTCCGGCGGTGGAGGATCACAGGTCA
CATTGAAGGAATCTGGCCCCGGCCTTGTTCAGCCAGGACAGACCCTTAGCCTCACCTGTGCCTTCAGTGGTTTTTCT
CTTAGCACTAGCGGTATGGGGGTCGGCTGGATTCGGCAGCCTCCCGGCAAAGGTCTTGAGTGGTTGGCTCACATTTG
GTGGGACGACGACAAACGGTATAATCCTGCCTTGAAAAGTCGGCTGACCATTAGTAAGGATACCTCAAAAAATCAAG
TGTACTTGCAAATGAATAGCCTTGACGCCGAGGATACGGCTGTATATTATTGCGCTCGGATGGAACTCTGGTCTTAC
TACTTTGATTATTGGGGGCAGGGGACTCTCGTCACGGTCTCGAGTGGCGGTGGAGGGTCCGGCGGTGGTGGATCAGA
CGTCGTGATGACCCAGTCTCCTTCCACCCTGTCTGCATCTGTAGGAGACAGAGTCACCATCAATTGCCAAGCCAGTG
AGAGCATTAGCAGTTGGTTAGCCTGGTATCAGCAGAAACCAGGGAAAGCCCCTAAGCTCCTGATCTATGAAGCATCC
AAACTGGCATCTGGGGTCCCATCAAGGTTCAGCGGCAGTGGATCTGGGACAGAATTTACTCTCACCATCAGCAGCCT
GCAGCCTGATGATTTTGCAACTTATTACTGCCAAGGCTATTTTTATTTTATTAGTCGTACTTATGTAAATTCTTTCG
GCTGTGGGACCAAGGTGGAGATCAAACGTACGGTGGCTGCACCATCTGTCTTCATCTTCCCGCCATCTGATGAGCAG
TTGAAATCTGGAACTGCCTCTGTTGTGTGCCTGCTGAATAACTTCTATCCCAGAGAGGCCAAAGTACAGTGGAAGGT
GGATAACGCCCTCCAATCGGGTAACTCCCAGGAGAGTGTCACAGAGCAGGACAGCAAGGACAGCACCTACAGCCTCA
GCAGCACCCTGACGCTGAGCAAAGCAGACTACGAGAAACACAAAGTCTACGCCTGCGAAGTCACCCATCAGGGCCTG
AGCTCGCCCGTCACAAAGAGCTTCAACAGGGGAGAGTGTGGCGGTGGCGGTAGCGGTGGCGGCGGAAGTGGTGGCGG
AGGATCCCAGTCTGCCCTGACTCAGCCTGCCTCCGTGTCTGGGTCTCCTGGACAGTCGATCACCATCTCCTGCACTG
GAACCAGCAGTGACGTTGGTGGTTATAACTTTGTCTCCTGGTACCAACAACACCCAGGCAAAGCCCCCAAACTCATG
ATCTATGATGTCAGTGATCGGCCCTCAGGGGTGTCTGATCGCTTCTCCGGCTCCAAGTCTGGCAACACGGCCTCCCT
GATCATCTCTGGCCTCCAGGCTGACGACGAGGCTGATTATTACTGCAGCTCATATGGGAGCAGCAGCACTCATGTGA
TTTTCGGCGGAGGGACCAAGGTGACCGTCCTAGGTGGAGGCGGTTCAGGCGGAGGTGGTTCCGGCGGTGGCGGCTCC
GGTGGAGGCGGCTCTCAGGTGCAATTGCAGGAGTCGGGGGGAGGCCTGGTCAAGCCTGGAGGGTCCCTGAGTCTCTC
CTGTGCAGCCTCTGGATTCACCTTTAGTAGTTATTGGATGAGCTGGGTCCGCCAGGCTCCAGGGAAGGGGCTGGAGT
GGGTGGCCAACATAAACCGCGATGGAAGTGCGAGTTACTATGTGGACTCTGTGAAGGGCCGATTCACCATCTCCAGA
GACGACGCCAAGAACTCACTGTATCTGCAAATGAACAGCCTGAGAGCTGAGGACACGGCTGTGTATTACTGTGCGAG
AGATCGTGGGGTGGGCTACTTCGATCTCTGGGGCCGTGGCACCCTGGTCACCGTCTCTAGCTGA
>SEQ ID 108 SI-55H11 chain B aa
ENVLTQSPASLSASPGERVTITCSASSSVSYMHWYQQKPGQAPKLWIYDTSKLASGVPSRFSGSGSGNDHTLTISSM
EPEDFATYYCFQGSVYPFTFGQGTKVTVLGGGGSGGGGSGGGGSGGGGSQVTLKESGPGLVQPGQTLSLTCAFSGFS
LSTSGMGVGWIRQPPGKGLEWLAHIWWDDDKRYNPALKSRLTISKDTSKNQVYLQMNSLDAEDTAVYYCARMELWSY
YFDYWGQGTLVTVSSGGGGSGGGGSDVVMTQSPSTLSASVGDRVTINCQASESISSWLAWYQQKPGKAPKLLIYEAS
KLASGVPSRFSGSGSGTEFTLTISSLQPDDFATYYCQGYFYFISRTYVNSFGCGTKVEIKRTVAAPSVFIFPPSDEQ
LKSGTASVVCLLNNFYPREAKVQWKVDNALQSGNSQESVTEQDSKDSTYSLSSTLTLSKADYEKHKVYACEVTHQGL
SSPVTKSFNRGECGGGGSGGGGSGGGGSQSALTQPASVSGSPGQSITISCTGTSSDVGGYNFVSWYQQHPGKAPKLM
IYDVSDRPSGVSDRFSGSKSGNTASLIISGLQADDEADYYCSSYGSSSTHVIFGGGTKVTVLGGGGSGGGGSGGGGS
GGGGSQVQLQESGGGLVKPGGSLSLSCAASGFTFSSYWMSWVRQAPGKGLEWVANINRDGSASYYVDSVKGRFTISR
DDAKNSLYLQMNSLRAEDTAVYYCARDRGVGYFDLWGRGTLVTVSS
>SEQ ID 109 SI-50E1 chain A nt
GACGTCGTGATGACCCAGTCTCCTTCCACCCTGTCTGCATCTGTAGGAGACAGAGTCACCATCAATTGCCAAGCCAG
TGAGAGCATTAGCAGTTGGTTAGCCTGGTATCAGCAGAAACCAGGGAAAGCCCCTAAGCTCCTGATCTATGAAGCAT
CCAAACTGGCATCTGGGGTCCCATCAAGGTTCAGCGGCAGTGGATCTGGGACAGAATTTACTCTCACCATCAGCAGC
CTGCAGCCTGATGATTTTGCAACTTATTACTGCCAAGGCTATTTTTATTTTATTAGTCGTACTTATGTAAATTCTTT
CGGCGGAGGGACCAAGGTGGAGATCAAAGGCGGTGGCGGTAGTGGGGGAGGCGGTTCTGGCGGCGGAGGGTCCGGCG
GTGGAGGATCAGAGGTGCAGCTGGTGGAGTCTGGGGGAGGCTTGGTCCAGCCTGGGGGGTCCCTGAGACTCTCCTGT
GCAGCCTCTGGATTCACCATCAGTACCAATGCAATGAGCTGGGTCCGCCAGGCTCCAGGGAAGGGGCTGGAGTGGAT
CGGAGTCATTACTGGTCGTGATATCACATACTACGCGAGCTGGGCGAAAGGCAGATTCACCATCTCCAGAGACAATT
CCAAGAACACGCTGTATCTTCAAATGAACAGCCTGAGAGCCGAGGACACGGCTGTGTATTACTGTGCGAGAGACGGT
GGTTCTTCTGCTATTACTAGTAACAACATTTGGGGCCAGGGAACCCTGGTCACCGTGTCGACAGGCGGTGGAGGGTC
CGGCGGTGGTGGATCAGAGGTTCAGCTGGTGGAGTCTGGCGGTGGCCTGGTGCAGCCAGGGGGCTCACTCCGTTTGT
CCTGTGCAGCTTCTGGCTTCAACATTAAAGACACCTATATACACTGGGTGCGTCAGGCCCCGGGTAAGGGCCTGGAA
TGGGTTGCAAGGATTTATCCTACGAATGGTTATACTAGATATGCCGATAGCGTCAAGGGCCGTTTCACTATAAGCGC
AGACACATCCAAAAACACAGCCTACCTGCAGATGAACAGCCTGCGTGCTGAGGACACTGCCGTCTATTATTGTTCTA
GATGGGGAGGGGACGGCTTCTATGCTATGGACTACTGGGGTCAAGGAACCCTGGTCACCGTCTCCTCGGCTAGCACC
AAGGGCCCATCGGTCTTCCCCCTGGCACCCTCCTCCAAGAGCACCTCTGGGGGCACAGCGGCCCTGGGCTGCCTGGT
CAAGGACTACTTCCCCGAACCGGTGACGGTGTCGTGGAACTCAGGCGCCCTGACCAGCGGCGTGCACACCTTCCCGG
CTGTCCTACAGTCCTCAGGACTCTACTCCCTCAGCAGCGTGGTGACCGTGCCCTCCAGCAGCTTGGGCACCCAGACC
TACATCTGCAACGTGAATCACAAGCCCAGCAACACCAAGGTGGACAAGAGAGTTGAGCCCAAATCTTGTGACAAAAC
TCACACATGCCCACCGTGCCCAGCACCTGAAGCCGCGGGGGCACCGTCAGTCTTCCTCTTCCCCCCAAAACCCAAGG
ACACCCTCATGATCTCCCGGACCCCTGAGGTCACATGCGTGGTGGTGGACGTGAGCCACGAAGACCCTGAGGTCAAG
TTCAACTGGTACGTGGACGGCGTGGAGGTGCATAATGCCAAGACAAAGCCGCGGGAGGAGCAGTACAACAGCACGTA
CCGTGTGGTCAGCGTCCTCACCGTCCTGCACCAGGACTGGCTGAATGGCAAGGAGTACAAGTGCGCGGTCTCCAACA
AAGCCCTCCCAGCCCCCATCGAGAAAACCATCTCCAAAGCCAAAGGGCAGCCCCGAGAACCACAGGTGTACACCCTG
CCCCCATCCCGGGATGAGCTGACCAAGAACCAGGTCAGCCTGACCTGCCTGGTCAAAGGCTTCTATCCCAGCGACAT
CGCCGTGGAGTGGGAGAGCAATGGGCAGCCGGAGAACAACTACAAGACCACGCCTCCCGTGCTGGACTCCGACGGCT
CCTTCTTCCTCTATAGCAAGCTCACCGTGGACAAGAGCAGGTGGCAGCAGGGGAACGTCTTCTCATGCTCCGTGATG
CATGAGGCTCTGCACAACCACTACACGCAGAAGAGCCTCTCCCTGTCTCCGGGTGGCGGTGGAGGGTCCGGCGGTGG
TGGATCCGAGGTGCAGCTGTTGGAGTCTGGGGGAGGCTTGGTACAGCCTGGGGGGTCCCTGAGACTCTCCTGTGCAG
CCTCTGGATTCTCCTTCAGTAGCGGGTACGACATGTGCTGGGTCCGCCAGGCTCCAGGGAAGGGGCTGGAGTGGATC
GCATGCATTGCTGCTGGTAGTGCTGGTATCACTTACGACGCGAACTGGGCGAAAGGCCGGTTCACCATCTCCAGAGA
CAATTCCAAGAACACGCTGTATCTGCAAATGAACAGCCTGAGAGCCGAGGACACGGCCGTATATTACTGTGCGAGAT
CGGCGTTTTCGTTCGACTACGCCATGGACCTCTGGGGCCAGGGAACCCTGGTCACCGTCTCGAGCGGTGGAGGCGGA
TCTGGCGGAGGTGGTTCCGGCGGTGGCGGCTCCGGTGGAGGCGGCTCTGACATCCAGATGACCCAGTCTCCTTCCAC
CCTGTCTGCATCTGTAGGAGACAGAGTCACCATCACTTGCCAGGCCAGTCAGAGCATTAGTTCCCACTTAAACTGGT
ATCAGCAGAAACCAGGGAAAGCCCCTAAGCTCCTGATCTATAAGGCATCCACTCTGGCATCTGGGGTCCCATCAAGG
TTCAGCGGCAGTGGATCTGGGACAGAATTTACTCTCACCATCAGCAGCCTGCAGCCTGATGATTTTGCAACTTATTA
CTGCCAACAGGGTTATAGTTGGGGTAATGTTGATAATGTTTTCGGCGGAGGGACCAAGGTGGAGATCAAAGGCGGTG
GAGGGTCCGGCGGTGGTGGCTCCGGACGGTCGCTGGTGGAGTCTGGGGGAGGCTTGGTCCAGCCTGGGGGGTCCCTG
AGACTCTCCTGTACTGCCTCTGGATTCACCATCAGTAGCTACCACATGCAGTGGGTCCGCCAGGCTCCAGGGAAGGG
GCTGGAGTACATCGGAACCATTAGTAGTGGTGGTAATGTATACTACGCAAGCTCCGCTAGAGGCAGATTCACCATCT
CCAGACCCTCGTCCAAGAACACGGTGGATCTTCAAATGAACAGCCTGAGAGCCGAGGACACGGCTGTGTATTACTGT
GCGAGAGACTCTGGTTATAGTGATCCTATGTGGGGCCAGGGAACCCTGGTCACCGTCTCTTCAGGCGGTGGCGGTAG
TGGGGGAGGCGGTTCTGGCGGCGGAGGGTCCGGCGGTGGAGGATCAGACGTTGTGATGACCCAGTCTCCATCTTCCG
TGTCTGCATCTGTAGGAGACAGAGTCACCATCACCTGTCAGGCCAGTCAGAACATTAGGACTTACTTATCCTGGTAT
CAGCAGAAACCAGGGAAAGCCCCTAAGCTCCTGATCTATGCTGCAGCCAATCTGGCATCTGGGGTCCCATCAAGGTT
CAGCGGCAGTGGATCTGGGACAGATTTCACTCTCACCATCAGCGACCTGGAGCCTGGCGATGCTGCAACTTACTATT
GTCAGTCTACCTATCTTGGTACTGATTATGTTGGCGGTGCTTTCGGCGGAGGGACCAAGGTGGAGATCAAATGA
>SEQ ID 110 SI-50E1 chain A aa
DVVMTQSPSTLSASVGDRVTINCQASESISSWLAWYQQKPGKAPKLLIYEASKLASGVPSRFSGSGSGTEFTLTISS
LQPDDFATYYCQGYFYFISRTYVNSFGGGTKVEIKGGGGSGGGGSGGGGSGGGGSEVQLVESGGGLVQPGGSLRLSC
AASGFTISTNAMSWVRQAPGKGLEWIGVITGRDITYYASWAKGRFTISRDNSKNTLYLQMNSLRAEDTAVYYCARDG
GSSAITSNNIWGQGTLVTVSTGGGGSGGGGSEVQLVESGGGLVQPGGSLRLSCAASGFNIKDTYIHWVRQAPGKGLE
WVARIYPTNGYTRYADSVKGRFTISADTSKNTAYLQMNSLRAEDTAVYYCSRWGGDGFYAMDYWGQGTLVTVSSAST
KGPSVFPLAPSSKSTSGGTAALGCLVKDYFPEPVTVSWNSGALTSGVHTFPAVLQSSGLYSLSSVVTVPSSSLGTQT
YICNVNHKPSNTKVDKRVEPKSCDKTHTCPPCPAPEAAGAPSVFLFPPKPKDTLMISRTPEVTCVVVDVSHEDPEVK
FNWYVDGVEVHNAKTKPREEQYNSTYRVVSVLTVLHQDWLNGKEYKCAVSNKALPAPIEKTISKAKGQPREPQVYTL
PPSRDELTKNQVSLTCLVKGFYPSDIAVEWESNGQPENNYKTTPPVLDSDGSFFLYSKLTVDKSRWQQGNVFSCSVM
HEALHNHYTQKSLSLSPGGGGGSGGGGSEVQLLESGGGLVQPGGSLRLSCAASGFSFSSGYDMCWVRQAPGKGLEWI
ACIAAGSAGITYDANWAKGRFTISRDNSKNTLYLQMNSLRAEDTAVYYCARSAFSFDYAMDLWGQGTLVTVSSGGGG
SGGGGSGGGGSGGGGSDIQMTQSPSTLSASVGDRVTITCQASQSISSHLNWYQQKPGKAPKLLIYKASTLASGVPSR
FSGSGSGTEFTLTISSLQPDDFATYYCQQGYSWGNVDNVFGGGTKVEIKGGGGSGGGGSGRSLVESGGGLVQPGGSL
RLSCTASGFTISSYHMQWVRQAPGKGLEYIGTISSGGNVYYASSARGRFTISRPSSKNTVDLQMNSLRAEDTAVYYC
ARDSGYSDPMWGQGTLVTVSSGGGGSGGGGSGGGGSGGGGSDVVMTQSPSSVSASVGDRVTITCQASQNIRTYLSWY
QQKPGKAPKLLIYAAANLASGVPSRFSGSGSGTDFTLTISDLEPGDAATYYCQSTYLGTDYVGGAFGGGTKVEIK
>SEQ ID 111 SI-50E1 and SI-50E6 chain B nt
GATATCCAGATGACCCAGTCCCCGAGCTCCCTGTCCGCCTCTGTGGGCGATAGGGTCACCATCACCTGCCGTGCCAG
TCAGGATGTGAATACTGCTGTAGCCTGGTATCAACAGAAACCAGGAAAAGCTCCGAAACTACTGATTTACTCGGCAT
CCTTCCTCTACTCTGGAGTCCCTTCTCGCTTCTCTGGCTCCAGATCTGGGACGGATTTCACTCTGACCATCAGCAGT
CTGCAGCCGGAAGACTTCGCAACTTATTACTGTCAGCAACATTATACTACTCCTCCCACGTTCGGACAGGGTACCAA
GGTGGAGATCAAACGTACGGTGGCTGCACCATCTGTCTTCATCTTCCCGCCATCTGATGAGCAGTTGAAATCTGGAA
CTGCCTCTGTTGTGTGCCTGCTGAATAACTTCTATCCCAGAGAGGCCAAAGTACAGTGGAAGGTGGATAACGCCCTC
CAATCGGGTAACTCCCAGGAGAGTGTCACAGAGCAGGACAGCAAGGACAGCACCTACAGCCTCAGCAGCACCCTGAC
GCTGAGCAAAGCAGACTACGAGAAACACAAAGTCTACGCCTGCGAAGTCACCCATCAGGGCCTGAGCTCGCCCGTCA
CAAAGAGCTTCAACAGGGGAGAGTGTTAG
>SEQ ID 112 SI-50E1 and SI-50E6 chain B aa
DIQMTQSPSSLSASVGDRVTITCRASQDVNTAVAWYQQKPGKAPKLLIYSASFLYSGVPSRFSGSRSGTDFTLTISS
LQPEDFATYYCQQHYTTPPTFGQGTKVEIKRTVAAPSVFIFPPSDEQLKSGTASVVCLLNNFYPREAKVQWKVDNAL
QSGNSQESVTEQDSKDSTYSLSSTLTLSKADYEKHKVYACEVTHQGLSSPVTKSFNRGEC
>SEQ ID 113 SI-50E6 chain A nt
GACGTCGTGATGACCCAGTCTCCTTCCACCCTGTCTGCATCTGTAGGAGACAGAGTCACCATCAATTGCCAAGCCAG
TGAGAGCATTAGCAGTTGGTTAGCCTGGTATCAGCAGAAACCAGGGAAAGCCCCTAAGCTCCTGATCTATGAAGCAT
CCAAACTGGCATCTGGGGTCCCATCAAGGTTCAGCGGCAGTGGATCTGGGACAGAATTTACTCTCACCATCAGCAGC
CTGCAGCCTGATGATTTTGCAACTTATTACTGCCAAGGCTATTTTTATTTTATTAGTCGTACTTATGTAAATTCTTT
CGGCTGTGGGACCAAGGTGGAGATCAAAGGTGGAGGCGGTTCAGGCGGAGGTGGAAGTGGTGGTGGCGGCTCTGGAG
GCGGCGGATCTGAGGTGCAGCTGGTGGAGTCTGGGGGAGGCTTGGTCCAGCCTGGGGGGTCCCTGAGACTCTCCTGT
GCAGCCTCTGGATTCACCATCAGTACCAATGCAATGAGCTGGGTCCGCCAGGCTCCAGGGAAGTGCCTGGAGTGGAT
CGGAGTCATTACTGGTCGTGATATCACATACTACGCGAGCTGGGCGAAAGGCAGATTCACCATCTCCAGAGACAATT
CCAAGAACACGCTGTATCTTCAAATGAACAGCCTGAGAGCCGAGGACACGGCTGTGTATTACTGTGCGAGAGACGGT
GGTTCTTCTGCTATTACTAGTAACAACATTTGGGGCCAGGGAACCCTGGTCACCGTGTCGACAGGCGGTGGAGGGTC
CGGCGGTGGTGGATCAGAGGTTCAGCTGGTGGAGTCTGGCGGTGGCCTGGTGCAGCCAGGGGGCTCACTCCGTTTGT
CCTGTGCAGCTTCTGGCTTCAACATTAAAGACACCTATATACACTGGGTGCGTCAGGCCCCGGGTAAGGGCCTGGAA
TGGGTTGCAAGGATTTATCCTACGAATGGTTATACTAGATATGCCGATAGCGTCAAGGGCCGTTTCACTATAAGCGC
AGACACATCCAAAAACACAGCCTACCTGCAGATGAACAGCCTGCGTGCTGAGGACACTGCCGTCTATTATTGTTCTA
GATGGGGAGGGGACGGCTTCTATGCTATGGACTACTGGGGTCAAGGAACCCTGGTCACCGTCTCCTCGGCTAGCACC
AAGGGCCCATCGGTCTTCCCCCTGGCACCCTCCTCCAAGAGCACCTCTGGGGGCACAGCGGCCCTGGGCTGCCTGGT
CAAGGACTACTTCCCCGAACCGGTGACGGTGTCGTGGAACTCAGGCGCCCTGACCAGCGGCGTGCACACCTTCCCGG
CTGTCCTACAGTCCTCAGGACTCTACTCCCTCAGCAGCGTGGTGACCGTGCCCTCCAGCAGCTTGGGCACCCAGACC
TACATCTGCAACGTGAATCACAAGCCCAGCAACACCAAGGTGGACAAGAGAGTTGAGCCCAAATCTTGTGACAAAAC
TCACACATGCCCACCGTGCCCAGCACCTGAAGCCGCGGGGGGACCGTCAGTCTTCCTCTTCCCCCCAAAACCCAAGG
ACACCCTCATGATCTCCCGGACCCCTGAGGTCACATGCGTGGTGGTGGACGTGAGCCACGAAGACCCTGAGGTCAAG
TTCAACTGGTACGTGGACGGCGTGGAGGTGCATAATGCCAAGACAAAGCCGCGGGAGGAGCAGTACGCCAGCACGTA
CCGTGTGGTCAGCGTCCTCACCGTCCTGCACCAGGACTGGCTGAATGGCAAGGAGTACAAGTGCGCGGTCTCCAACA
AAGCCCTCCCAGCCCCCATCGAGAAAACCATCTCCAAAGCCAAAGGGCAGCCCCGAGAACCACAGGTGTACACCCTG
CCCCCATCCCGGGATGAGCTGACCAAGAACCAGGTCAGCCTGACCTGCCTGGTCAAAGGCTTCTATCCCAGCGACAT
CGCCGTGGAGTGGGAGAGCAATGGGCAGCCGGAGAACAACTACAAGACCACGCCTCCCGTGCTGGACTCCGACGGCT
CCTTCTTCCTCTATAGCAAGCTCACCGTGGACAAGAGCAGGTGGCAGCAGGGGAACGTCTTCTCATGCTCCGTGATG
CATGAGGCTCTGCACAACCACTACACGCAGAAGAGCCTCTCCCTGTCTCCGGGTGGCGGTGGAGGGTCCGGCGGTGG
TGGATCCGAGGTGCAGCTGTTGGAGTCTGGGGGAGGCTTGGTACAGCCTGGGGGGTCCCTGAGACTCTCCTGTGCAG
CCTCTGGATTCTCCTTCAGTAGCGGGTACGACATGTGCTGGGTCCGCCAGGCTCCAGGGAAGTGCCTGGAGTGGATC
GCATGCATTGCTGCTGGTAGTGCTGGTATCACTTACGACGCGAACTGGGCGAAAGGCCGGTTCACCATCTCCAGAGA
CAATTCCAAGAACACGCTGTATCTGCAAATGAACAGCCTGAGAGCCGAGGACACGGCCGTATATTACTGTGCGAGAT
CGGCGTTTTCGTTCGACTACGCCATGGACCTCTGGGGCCAGGGAACCCTGGTCACCGTCTCGAGCGGTGGAGGCGGT
TCAGGCGGAGGTGGAAGTGGTGGTGGCGGCTCTGGAGGCGGCGGATCTGACATCCAGATGACCCAGTCTCCTTCCAC
CCTGTCTGCATCTGTAGGAGACAGAGTCACCATCACTTGCCAGGCCAGTCAGAGCATTAGTTCCCACTTAAACTGGT
ATCAGCAGAAACCAGGGAAAGCCCCTAAGCTCCTGATCTATAAGGCATCCACTCTGGCATCTGGGGTCCCATCAAGG
TTCAGCGGCAGTGGATCTGGGACAGAATTTACTCTCACCATCAGCAGCCTGCAGCCTGATGATTTTGCAACTTATTA
CTGCCAACAGGGTTATAGTTGGGGTAATGTTGATAATGTTTTCGGCTGCGGGACCAAGGTGGAGATCAAAGGTGGTG
GCGGCTCTGGAGGAGGAGGGTCCGGACGGTCGCTGGTGGAGTCTGGGGGAGGCTTGGTCCAGCCTGGGGGGTCCCTG
AGACTCTCCTGTACTGCCTCTGGATTCACCATCAGTAGCTACCACATGCAGTGGGTCCGGCAGGCACCTGGGAAGTG
CCTGGAGTACATCGGAACCATTAGTAGTGGTGGTAATGTATACTACGCAAGCTCCGCTAGAGGCAGATTCACCATCT
CCAGACCCTCGTCCAAGAACACGGTGGATCTTCAAATGAACAGCCTGAGAGCCGAGGACACGGCTGTGTATTACTGT
GCGAGAGACTCTGGTTATAGTGATCCTATGTGGGGCCAGGGAACCCTGGTCACCGTCTCTTCAGGCGGTGGCGGTAG
TGGGGGAGGCGGTTCTGGCGGCGGAGGGTCCGGCGGTGGAGGATCAGACGTTGTGATGACCCAGTCTCCATCTTCCG
TGTCTGCATCTGTAGGAGACAGAGTCACCATCACCTGTCAGGCCAGTCAGAACATTAGGACTTACTTATCCTGGTAT
CAGCAGAAACCAGGGAAAGCCCCTAAGCTCCTGATCTATGCTGCAGCCAATCTGGCATCTGGGGTCCCATCAAGGTT
CAGCGGCAGTGGATCTGGGACAGATTTCACTCTCACCATCAGCGACTTGGAACCTGGCGATGCTGCAACTTACTATT
GTCAGTCTACCTATCTTGGTACTGATTATGTTGGCGGTGCTTTCGGCTGTGGGACCAAGGTGGAGATCAAATGA
>SEQ ID 114 SI-50E6 chain A aa
DVVMTQSPSTLSASVGDRVTINCQASESISSWLAWYQQKPGKAPKLLIYEASKLASGVPSRFSGSGSGTEFTLTISS
LQPDDFATYYCQGYFYFISRTYVNSFGCGTKVEIKGGGGSGGGGSGGGGSGGGGSEVQLVESGGGLVQPGGSLRLSC
AASGFTISTNAMSWVRQAPGKCLEWIGVITGRDITYYASWAKGRFTISRDNSKNTLYLQMNSLRAEDTAVYYCARDG
GSSAITSNNIWGQGTLVTVSTGGGGSGGGGSEVQLVESGGGLVQPGGSLRLSCAASGFNIKDTYIHWVRQAPGKGLE
WVARIYPTNGYTRYADSVKGRFTISADTSKNTAYLQMNSLRAEDTAVYYCSRWGGDGFYAMDYWGQGTLVTVSSAST
KGPSVFPLAPSSKSTSGGTAALGCLVKDYFPEPVTVSWNSGALTSGVHTFPAVLQSSGLYSLSSVVTVPSSSLGTQT
YICNVNHKPSNTKVDKRVEPKSCDKTHTCPPCPAPEAAGGPSVFLFPPKPKDTLMISRTPEVTCVVVDVSHEDPEVK
FNWYVDGVEVHNAKTKPREEQYASTYRVVSVLTVLHQDWLNGKEYKCAVSNKALPAPIEKTISKAKGQPREPQVYTL
PPSRDELTKNQVSLTCLVKGFYPSDIAVEWESNGQPENNYKTTPPVLDSDGSFFLYSKLTVDKSRWQQGNVFSCSVM
HEALHNHYTQKSLSLSPGGGGGSGGGGSEVQLLESGGGLVQPGGSLRLSCAASGFSFSSGYDMCWVRQAPGKCLEWI
ACIAAGSAGITYDANWAKGRFTISRDNSKNTLYLQMNSLRAEDTAVYYCARSAFSFDYAMDLWGQGTLVTVSSGGGG
SGGGGSGGGGSGGGGSDIQMTQSPSTLSASVGDRVTITCQASQSISSHLNWYQQKPGKAPKLLIYKASTLASGVPSR
FSGSGSGTEFTLTISSLQPDDFATYYCQQGYSWGNVDNVFGCGTKVEIKGGGGSGGGGSGRSLVESGGGLVQPGGSL
RLSCTASGFTISSYHMQWVRQAPGKCLEYIGTISSGGNVYYASSARGRFTISRPSSKNTVDLQMNSLRAEDTAVYYC
ARDSGYSDPMWGQGTLVTVSSGGGGSGGGGSGGGGSGGGGSDVVMTQSPSSVSASVGDRVTITCQASQNIRTYLSWY
QQKPGKAPKLLIYAAANLASGVPSRFSGSGSGTDFTLTISDLEPGDAATYYCQSTYLGTDYVGGAFGCGTKVEIK
>SEQ ID 115 SI-50E2 chain A nt
GACGTCGTGATGACCCAGTCTCCTTCCACCCTGTCTGCATCTGTAGGAGACAGAGTCACCATCAATTGCCAAGCCAG
TGAGAGCATTAGCAGTTGGTTAGCCTGGTATCAGCAGAAACCAGGGAAAGCCCCTAAGCTCCTGATCTATGAAGCAT
CCAAACTGGCATCTGGGGTCCCATCAAGGTTCAGCGGCAGTGGATCTGGGACAGAATTTACTCTCACCATCAGCAGC
CTGCAGCCTGATGATTTTGCAACTTATTACTGCCAAGGCTATTTTTATTTTATTAGTCGTACTTATGTAAATTCTTT
CGGCGGAGGGACCAAGGTGGAGATCAAAGGCGGTGGCGGTAGTGGGGGAGGCGGTTCTGGCGGCGGAGGGTCCGGCG
GTGGAGGATCAGAGGTGCAGCTGGTGGAGTCTGGGGGAGGCTTGGTCCAGCCTGGGGGGTCCCTGAGACTCTCCTGT
GCAGCCTCTGGATTCACCATCAGTACCAATGCAATGAGCTGGGTCCGCCAGGCTCCAGGGAAGGGGCTGGAGTGGAT
CGGAGTCATTACTGGTCGTGATATCACATACTACGCGAGCTGGGCGAAAGGCAGATTCACCATCTCCAGAGACAATT
CCAAGAACACGCTGTATCTTCAAATGAACAGCCTGAGAGCCGAGGACACGGCTGTGTATTACTGTGCGAGAGACGGT
GGTTCTTCTGCTATTACTAGTAACAACATTTGGGGCCAGGGAACCCTGGTCACCGTGTCGACAGGCGGTGGAGGGTC
CGGCGGTGGTGGATCAGAAGTGCAGCTCGTCGAAAGCGGTGGCGGACTGGTTCAGCCCGGTGGTTCTCTGCGGCTGT
CTTGTGCTGCCTCGGGTTTCACGTTCACTGACTACACAATGGACTGGGTGCGTCAGGCTCCTGGAAAGGGATTGGAG
TGGGTAGCCGACGTTAATCCAAACTCCGGCGGGAGCATCTACAACCAGAGGTTCAAGGGGAGGTTCACTCTGAGCGT
GGATCGCTCCAAGAACACGCTGTACCTCCAGATGAACTCTCTCAGGGCCGAGGACACGGCTGTTTACTATTGCGCGA
GGAACCTGGGTCCTTCCTTCTACTTCGACTACTGGGGACAGGGAACCCTGGTGACCGTCAGCTCCGCTAGCACCAAG
GGCCCATCGGTCTTCCCCCTGGCACCCTCCTCCAAGAGCACCTCTGGGGGCACAGCGGCCCTGGGCTGCCTGGTCAA
GGACTACTTCCCCGAACCGGTGACGGTGTCGTGGAACTCAGGCGCCCTGACCAGCGGCGTGCACACCTTCCCGGCTG
TCCTACAGTCCTCAGGACTCTACTCCCTCAGCAGCGTGGTGACCGTGCCCTCCAGCAGCTTGGGCACCCAGACCTAC
ATCTGCAACGTGAATCACAAGCCCAGCAACACCAAGGTGGACAAGAGAGTTGAGCCCAAATCTTGTGACAAAACTCA
CACATGCCCACCGTGCCCAGCACCTGAAGCCGCGGGGGCACCGTCAGTCTTCCTCTTCCCCCCAAAACCCAAGGACA
CCCTCATGATCTCCCGGACCCCTGAGGTCACATGCGTGGTGGTGGACGTGAGCCACGAAGACCCTGAGGTCAAGTTC
AACTGGTACGTGGACGGCGTGGAGGTGCATAATGCCAAGACAAAGCCGCGGGAGGAGCAGTACAACAGCACGTACCG
TGTGGTCAGCGTCCTCACCGTCCTGCACCAGGACTGGCTGAATGGCAAGGAGTACAAGTGCGCGGTCTCCAACAAAG
CCCTCCCAGCCCCCATCGAGAAAACCATCTCCAAAGCCAAAGGGCAGCCCCGAGAACCACAGGTGTACACCCTGCCC
CCATCCCGGGATGAGCTGACCAAGAACCAGGTCAGCCTGACCTGCCTGGTCAAAGGCTTCTATCCCAGCGACATCGC
CGTGGAGTGGGAGAGCAATGGGCAGCCGGAGAACAACTACAAGACCACGCCTCCCGTGCTGGACTCCGACGGCTCCT
TCTTCCTCTATAGCAAGCTCACCGTGGACAAGAGCAGGTGGCAGCAGGGGAACGTCTTCTCATGCTCCGTGATGCAT
GAGGCTCTGCACAACCACTACACGCAGAAGAGCCTCTCCCTGTCTCCGGGTGGCGGTGGAGGGTCCGGCGGTGGTGG
ATCCGAGGTGCAGCTGTTGGAGTCTGGGGGAGGCTTGGTACAGCCTGGGGGGTCCCTGAGACTCTCCTGTGCAGCCT
CTGGATTCTCCTTCAGTAGCGGGTACGACATGTGCTGGGTCCGCCAGGCTCCAGGGAAGGGGCTGGAGTGGATCGCA
TGCATTGCTGCTGGTAGTGCTGGTATCACTTACGACGCGAACTGGGCGAAAGGCCGGTTCACCATCTCCAGAGACAA
TTCCAAGAACACGCTGTATCTGCAAATGAACAGCCTGAGAGCCGAGGACACGGCCGTATATTACTGTGCGAGATCGG
CGTTTTCGTTCGACTACGCCATGGACCTCTGGGGCCAGGGAACCCTGGTCACCGTCTCGAGCGGTGGAGGCGGATCT
GGCGGAGGTGGTTCCGGCGGTGGCGGCTCCGGTGGAGGCGGCTCTGACATCCAGATGACCCAGTCTCCTTCCACCCT
GTCTGCATCTGTAGGAGACAGAGTCACCATCACTTGCCAGGCCAGTCAGAGCATTAGTTCCCACTTAAACTGGTATC
AGCAGAAACCAGGGAAAGCCCCTAAGCTCCTGATCTATAAGGCATCCACTCTGGCATCTGGGGTCCCATCAAGGTTC
AGCGGCAGTGGATCTGGGACAGAATTTACTCTCACCATCAGCAGCCTGCAGCCTGATGATTTTGCAACTTATTACTG
CCAACAGGGTTATAGTTGGGGTAATGTTGATAATGTTTTCGGCGGAGGGACCAAGGTGGAGATCAAAGGCGGTGGAG
GGTCCGGCGGTGGTGGCTCCGGACGGTCGCTGGTGGAGTCTGGGGGAGGCTTGGTCCAGCCTGGGGGGTCCCTGAGA
CTCTCCTGTACTGCCTCTGGATTCACCATCAGTAGCTACCACATGCAGTGGGTCCGCCAGGCTCCAGGGAAGGGGCT
GGAGTACATCGGAACCATTAGTAGTGGTGGTAATGTATACTACGCAAGCTCCGCTAGAGGCAGATTCACCATCTCCA
GACCCTCGTCCAAGAACACGGTGGATCTTCAAATGAACAGCCTGAGAGCCGAGGACACGGCTGTGTATTACTGTGCG
AGAGACTCTGGTTATAGTGATCCTATGTGGGGCCAGGGAACCCTGGTCACCGTCTCTTCAGGCGGTGGCGGTAGTGG
GGGAGGCGGTTCTGGCGGCGGAGGGTCCGGCGGTGGAGGATCAGACGTTGTGATGACCCAGTCTCCATCTTCCGTGT
CTGCATCTGTAGGAGACAGAGTCACCATCACCTGTCAGGCCAGTCAGAACATTAGGACTTACTTATCCTGGTATCAG
CAGAAACCAGGGAAAGCCCCTAAGCTCCTGATCTATGCTGCAGCCAATCTGGCATCTGGGGTCCCATCAAGGTTCAG
CGGCAGTGGATCTGGGACAGATTTCACTCTCACCATCAGCGACCTGGAGCCTGGCGATGCTGCAACTTACTATTGTC
AGTCTACCTATCTTGGTACTGATTATGTTGGCGGTGCTTTCGGCGGAGGGACCAAGGTGGAGATCAAATGA
>SEQ ID 116 SI-50E2 chain A aa
DVVMTQSPSTLSASVGDRVTINCQASESISSWLAWYQQKPGKAPKLLIYEASKLASGVPSRFSGSGSGTEFTLTISS
LQPDDFATYYCQGYFYFISRTYVNSFGGGTKVEIKGGGGSGGGGSGGGGSGGGGSEVQLVESGGGLVQPGGSLRLSC
AASGFTISTNAMSWVRQAPGKGLEWIGVITGRDITYYASWAKGRFTISRDNSKNTLYLQMNSLRAEDTAVYYCARDG
GSSAITSNNIWGQGTLVTVSTGGGGSGGGGSEVQLVESGGGLVQPGGSLRLSCAASGFTFTDYTMDWVRQAPGKGLE
WVADVNPNSGGSIYNQRFKGRFTLSVDRSKNTLYLQMNSLRAEDTAVYYCARNLGPSFYFDYWGQGTLVTVSSASTK
GPSVFPLAPSSKSTSGGTAALGCLVKDYFPEPVTVSWNSGALTSGVHTFPAVLQSSGLYSLSSVVTVPSSSLGTQTY
ICNVNHKPSNTKVDKRVEPKSCDKTHTCPPCPAPEAAGAPSVFLFPPKPKDTLMISRTPEVTCVVVDVSHEDPEVKF
NWYVDGVEVHNAKTKPREEQYNSTYRVVSVLTVLHQDWLNGKEYKCAVSNKALPAPIEKTISKAKGQPREPQVYTLP
PSRDELTKNQVSLTCLVKGFYPSDIAVEWESNGQPENNYKTTPPVLDSDGSFFLYSKLTVDKSRWQQGNVFSCSVMH
EALHNHYTQKSLSLSPGGGGGSGGGGSEVQLLESGGGLVQPGGSLRLSCAASGFSFSSGYDMCWVRQAPGKGLEWIA
CIAAGSAGITYDANWAKGRFTISRDNSKNTLYLQMNSLRAEDTAVYYCARSAFSFDYAMDLWGQGTLVTVSSGGGGS
GGGGSGGGGSGGGGSDIQMTQSPSTLSASVGDRVTITCQASQSISSHLNWYQQKPGKAPKLLIYKASTLASGVPSRF
SGSGSGTEFTLTISSLQPDDFATYYCQQGYSWGNVDNVFGGGTKVEIKGGGGSGGGGSGRSLVESGGGLVQPGGSLR
LSCTASGFTISSYHMQWVRQAPGKGLEYIGTISSGGNVYYASSARGRFTISRPSSKNTVDLQMNSLRAEDTAVYYCA
RDSGYSDPMWGQGTLVTVSSGGGGSGGGGSGGGGSGGGGSDVVMTQSPSSVSASVGDRVTITCQASQNIRTYLSWYQ
QKPGKAPKLLIYAAANLASGVPSRFSGSGSGTDFTLTISDLEPGDAATYYCQSTYLGTDYVGGAFGGGTKVEIK
>SEQ ID 117 SI-50E2 and SI-50E7 chain B nt
GACATCCAGATGACACAATCTCCTAGCAGTCTGAGCGCAAGTGTTGGAGATCGTGTCACCATCACATGCAAGGCCAG
CCAGGATGTGAGCATTGGAGTCGCCTGGTATCAGCAGAAACCCGGCAAGGCACCCAAGCTGCTGATCTACTCGGCCA
GTTACAGATACACTGGCGTACCTTCGAGGTTTAGTGGTAGCGGTTCTGGAACCGATTTCACCCTCACCATTAGCTCC
CTCCAACCCGAGGACTTCGCCACCTACTACTGCCAGCAATACTACATCTACCCTTACACGTTCGGCCAAGGCACTAA
GGTCGAGATTAAACGTACGGTGGCTGCACCATCTGTCTTCATCTTCCCGCCATCTGATGAGCAGTTGAAATCTGGAA
CTGCCTCTGTTGTGTGCCTGCTGAATAACTTCTATCCCAGAGAGGCCAAAGTACAGTGGAAGGTGGATAACGCCCTC
CAATCGGGTAACTCCCAGGAGAGTGTCACAGAGCAGGACAGCAAGGACAGCACCTACAGCCTCAGCAGCACCCTGAC
GCTGAGCAAAGCAGACTACGAGAAACACAAAGTCTACGCCTGCGAAGTCACCCATCAGGGCCTGAGCTCGCCCGTCA
CAAAGAGCTTCAACAGGGGAGAGTGTTAG
>SEQ ID 118 SI-50E2 and SI-50E7 chain B aa
DIQMTQSPSSLSASVGDRVTITCKASQDVSIGVAWYQQKPGKAPKLLIYSASYRYTGVPSRFSGSGSGTDFTLTISS
LQPEDFATYYCQQYYIYPYTFGQGTKVEIKRTVAAPSVFIFPPSDEQLKSGTASVVCLLNNFYPREAKVQWKVDNAL
QSGNSQESVTEQDSKDSTYSLSSTLTLSKADYEKHKVYACEVTHQGLSSPVTKSFNRGEC
>SEQ ID 119 SI-50E7 chain A nt
GACGTCGTGATGACCCAGTCTCCTTCCACCCTGTCTGCATCTGTAGGAGACAGAGTCACCATCAATTGCCAAGCCAG
TGAGAGCATTAGCAGTTGGTTAGCCTGGTATCAGCAGAAACCAGGGAAAGCCCCTAAGCTCCTGATCTATGAAGCAT
CCAAACTGGCATCTGGGGTCCCATCAAGGTTCAGCGGCAGTGGATCTGGGACAGAATTTACTCTCACCATCAGCAGC
CTGCAGCCTGATGATTTTGCAACTTATTACTGCCAAGGCTATTTTTATTTTATTAGTCGTACTTATGTAAATTCTTT
CGGCTGTGGGACCAAGGTGGAGATCAAAGGTGGAGGCGGTTCAGGCGGAGGTGGAAGTGGTGGTGGCGGCTCTGGAG
GCGGCGGATCTGAGGTGCAGCTGGTGGAGTCTGGGGGAGGCTTGGTCCAGCCTGGGGGGTCCCTGAGACTCTCCTGT
GCAGCCTCTGGATTCACCATCAGTACCAATGCAATGAGCTGGGTCCGCCAGGCTCCAGGGAAGTGCCTGGAGTGGAT
CGGAGTCATTACTGGTCGTGATATCACATACTACGCGAGCTGGGCGAAAGGCAGATTCACCATCTCCAGAGACAATT
CCAAGAACACGCTGTATCTTCAAATGAACAGCCTGAGAGCCGAGGACACGGCTGTGTATTACTGTGCGAGAGACGGT
GGTTCTTCTGCTATTACTAGTAACAACATTTGGGGCCAGGGAACCCTGGTCACCGTGTCGACAGGCGGTGGAGGGTC
CGGCGGTGGTGGATCAGAAGTGCAGCTCGTCGAAAGCGGTGGCGGACTGGTTCAGCCCGGTGGTTCTCTGCGGCTGT
CTTGTGCTGCCTCGGGTTTCACGTTCACTGACTACACAATGGACTGGGTGCGTCAGGCTCCTGGAAAGGGATTGGAG
TGGGTAGCCGACGTTAATCCAAACTCCGGCGGGAGCATCTACAACCAGAGGTTCAAGGGGAGGTTCACTCTGAGCGT
GGATCGCTCCAAGAACACGCTGTACCTCCAGATGAACTCTCTCAGGGCCGAGGACACGGCTGTTTACTATTGCGCGA
GGAACCTGGGTCCTTCCTTCTACTTCGACTACTGGGGACAGGGAACCCTGGTGACCGTCAGCTCCGCTAGCACCAAG
GGCCCATCGGTCTTCCCCCTGGCACCCTCCTCCAAGAGCACCTCTGGGGGCACAGCGGCCCTGGGCTGCCTGGTCAA
GGACTACTTCCCCGAACCGGTGACGGTGTCGTGGAACTCAGGCGCCCTGACCAGCGGCGTGCACACCTTCCCGGCTG
TCCTACAGTCCTCAGGACTCTACTCCCTCAGCAGCGTGGTGACCGTGCCCTCCAGCAGCTTGGGCACCCAGACCTAC
ATCTGCAACGTGAATCACAAGCCCAGCAACACCAAGGTGGACAAGAGAGTTGAGCCCAAATCTTGTGACAAAACTCA
CACATGCCCACCGTGCCCAGCACCTGAAGCCGCGGGGGGACCGTCAGTCTTCCTCTTCCCCCCAAAACCCAAGGACA
CCCTCATGATCTCCCGGACCCCTGAGGTCACATGCGTGGTGGTGGACGTGAGCCACGAAGACCCTGAGGTCAAGTTC
AACTGGTACGTGGACGGCGTGGAGGTGCATAATGCCAAGACAAAGCCGCGGGAGGAGCAGTACGCCAGCACGTACCG
TGTGGTCAGCGTCCTCACCGTCCTGCACCAGGACTGGCTGAATGGCAAGGAGTACAAGTGCGCGGTCTCCAACAAAG
CCCTCCCAGCCCCCATCGAGAAAACCATCTCCAAAGCCAAAGGGCAGCCCCGAGAACCACAGGTGTACACCCTGCCC
CCATCCCGGGATGAGCTGACCAAGAACCAGGTCAGCCTGACCTGCCTGGTCAAAGGCTTCTATCCCAGCGACATCGC
CGTGGAGTGGGAGAGCAATGGGCAGCCGGAGAACAACTACAAGACCACGCCTCCCGTGCTGGACTCCGACGGCTCCT
TCTTCCTCTATAGCAAGCTCACCGTGGACAAGAGCAGGTGGCAGCAGGGGAACGTCTTCTCATGCTCCGTGATGCAT
GAGGCTCTGCACAACCACTACACGCAGAAGAGCCTCTCCCTGTCTCCGGGTGGCGGTGGAGGGTCCGGCGGTGGTGG
ATCCGAGGTGCAGCTGTTGGAGTCTGGGGGAGGCTTGGTACAGCCTGGGGGGTCCCTGAGACTCTCCTGTGCAGCCT
CTGGATTCTCCTTCAGTAGCGGGTACGACATGTGCTGGGTCCGCCAGGCTCCAGGGAAGTGCCTGGAGTGGATCGCA
TGCATTGCTGCTGGTAGTGCTGGTATCACTTACGACGCGAACTGGGCGAAAGGCCGGTTCACCATCTCCAGAGACAA
TTCCAAGAACACGCTGTATCTGCAAATGAACAGCCTGAGAGCCGAGGACACGGCCGTATATTACTGTGCGAGATCGG
CGTTTTCGTTCGACTACGCCATGGACCTCTGGGGCCAGGGAACCCTGGTCACCGTCTCGAGCGGTGGAGGCGGTTCA
GGCGGAGGTGGAAGTGGTGGTGGCGGCTCTGGAGGCGGCGGATCTGACATCCAGATGACCCAGTCTCCTTCCACCCT
GTCTGCATCTGTAGGAGACAGAGTCACCATCACTTGCCAGGCCAGTCAGAGCATTAGTTCCCACTTAAACTGGTATC
AGCAGAAACCAGGGAAAGCCCCTAAGCTCCTGATCTATAAGGCATCCACTCTGGCATCTGGGGTCCCATCAAGGTTC
AGCGGCAGTGGATCTGGGACAGAATTTACTCTCACCATCAGCAGCCTGCAGCCTGATGATTTTGCAACTTATTACTG
CCAACAGGGTTATAGTTGGGGTAATGTTGATAATGTTTTCGGCTGCGGGACCAAGGTGGAGATCAAAGGTGGTGGCG
GCTCTGGAGGAGGAGGGTCCGGACGGTCGCTGGTGGAGTCTGGGGGAGGCTTGGTCCAGCCTGGGGGGTCCCTGAGA
CTCTCCTGTACTGCCTCTGGATTCACCATCAGTAGCTACCACATGCAGTGGGTCCGGCAGGCACCTGGGAAGTGCCT
GGAGTACATCGGAACCATTAGTAGTGGTGGTAATGTATACTACGCAAGCTCCGCTAGAGGCAGATTCACCATCTCCA
GACCCTCGTCCAAGAACACGGTGGATCTTCAAATGAACAGCCTGAGAGCCGAGGACACGGCTGTGTATTACTGTGCG
AGAGACTCTGGTTATAGTGATCCTATGTGGGGCCAGGGAACCCTGGTCACCGTCTCTTCAGGCGGTGGCGGTAGTGG
GGGAGGCGGTTCTGGCGGCGGAGGGTCCGGCGGTGGAGGATCAGACGTTGTGATGACCCAGTCTCCATCTTCCGTGT
CTGCATCTGTAGGAGACAGAGTCACCATCACCTGTCAGGCCAGTCAGAACATTAGGACTTACTTATCCTGGTATCAG
CAGAAACCAGGGAAAGCCCCTAAGCTCCTGATCTATGCTGCAGCCAATCTGGCATCTGGGGTCCCATCAAGGTTCAG
CGGCAGTGGATCTGGGACAGATTTCACTCTCACCATCAGCGACTTGGAACCTGGCGATGCTGCAACTTACTATTGTC
AGTCTACCTATCTTGGTACTGATTATGTTGGCGGTGCTTTCGGCTGTGGGACCAAGGTGGAGATCAAATGA
>SEQ ID 120 SI-50E7 chain A aa
DVVMTQSPSTLSASVGDRVTINCQASESISSWLAWYQQKPGKAPKLLIYEASKLASGVPSRFSGSGSGTEFTLTISS
LQPDDFATYYCQGYFYFISRTYVNSFGCGTKVEIKGGGGSGGGGSGGGGSGGGGSEVQLVESGGGLVQPGGSLRLSC
AASGFTISTNAMSWVRQAPGKCLEWIGVITGRDITYYASWAKGRFTISRDNSKNTLYLQMNSLRAEDTAVYYCARDG
GSSAITSNNIWGQGTLVTVSTGGGGSGGGGSEVQLVESGGGLVQPGGSLRLSCAASGFTFTDYTMDWVRQAPGKGLE
WVADVNPNSGGSIYNQRFKGRFTLSVDRSKNTLYLQMNSLRAEDTAVYYCARNLGPSFYFDYWGQGTLVTVSSASTK
GPSVFPLAPSSKSTSGGTAALGCLVKDYFPEPVTVSWNSGALTSGVHTFPAVLQSSGLYSLSSVVTVPSSSLGTQTY
ICNVNHKPSNTKVDKRVEPKSCDKTHTCPPCPAPEAAGGPSVFLFPPKPKDTLMISRTPEVTCVVVDVSHEDPEVKF
NWYVDGVEVHNAKTKPREEQYASTYRVVSVLTVLHQDWLNGKEYKCAVSNKALPAPIEKTISKAKGQPREPQVYTLP
PSRDELTKNQVSLTCLVKGFYPSDIAVEWESNGQPENNYKTTPPVLDSDGSFFLYSKLTVDKSRWQQGNVFSCSVMH
EALHNHYTQKSLSLSPGGGGGSGGGGSEVQLLESGGGLVQPGGSLRLSCAASGFSFSSGYDMCWVRQAPGKCLEWIA
CIAAGSAGITYDANWAKGRFTISRDNSKNTLYLQMNSLRAEDTAVYYCARSAFSFDYAMDLWGQGTLVTVSSGGGGS
GGGGSGGGGSGGGGSDIQMTQSPSTLSASVGDRVTITCQASQSISSHLNWYQQKPGKAPKLLIYKASTLASGVPSRF
SGSGSGTEFTLTISSLQPDDFATYYCQQGYSWGNVDNVFGCGTKVEIKGGGGSGGGGSGRSLVESGGGLVQPGGSLR
LSCTASGFTISSYHMQWVRQAPGKCLEYIGTISSGGNVYYASSARGRFTISRPSSKNTVDLQMNSLRAEDTAVYYCA
RDSGYSDPMWGQGTLVTVSSGGGGSGGGGSGGGGSGGGGSDVVMTQSPSSVSASVGDRVTITCQASQNIRTYLSWYQ
QKPGKAPKLLIYAAANLASGVPSRFSGSGSGTDFTLTISDLEPGDAATYYCQSTYLGTDYVGGAFGCGTKVEIK
>SEQ ID 121 SI-51E1 chain A nt
GACGTCGTGATGACCCAGTCTCCTTCCACCCTGTCTGCATCTGTAGGAGACAGAGTCACCATCAATTGCCAAGCCAG
TGAGAGCATTAGCAGTTGGTTAGCCTGGTATCAGCAGAAACCAGGGAAAGCCCCTAAGCTCCTGATCTATGAAGCAT
CCAAACTGGCATCTGGGGTCCCATCAAGGTTCAGCGGCAGTGGATCTGGGACAGAATTTACTCTCACCATCAGCAGC
CTGCAGCCTGATGATTTTGCAACTTATTACTGCCAAGGCTATTTTTATTTTATTAGTCGTACTTATGTAAATTCTTT
CGGCGGAGGGACCAAGGTGGAGATCAAAGGCGGTGGCGGTAGTGGGGGAGGCGGTTCTGGCGGCGGAGGGTCCGGCG
GTGGAGGATCAGAGGTGCAGCTGGTGGAGTCTGGGGGAGGCTTGGTCCAGCCTGGGGGGTCCCTGAGACTCTCCTGT
GCAGCCTCTGGATTCACCATCAGTACCAATGCAATGAGCTGGGTCCGCCAGGCTCCAGGGAAGGGGCTGGAGTGGAT
CGGAGTCATTACTGGTCGTGATATCACATACTACGCGAGCTGGGCGAAAGGCAGATTCACCATCTCCAGAGACAATT
CCAAGAACACGCTGTATCTTCAAATGAACAGCCTGAGAGCCGAGGACACGGCTGTGTATTACTGTGCGAGAGACGGT
GGTTCTTCTGCTATTACTAGTAACAACATTTGGGGCCAGGGAACCCTGGTCACCGTGTCGACAGGCGGTGGAGGGTC
CGGCGGTGGTGGATCACAGGTACAACTGCAGCAGTCTGGGCCTGAGCTGGAGAAGCCTGGCGCTTCAGTGAAGATAT
CCTGCAAGGCTTCTGGTTACTCATTCACTGGCTACACCATGAACTGGGTGAAGCAGAGCCATGGAAAGAGCCTTGAG
TGGATTGGACTTATTACTCCTTACAATGGTGCTTCTAGCTACAACCAGAAGTTCAGGGGCAAGGCCACATTAACTGT
AGACAAGTCATCCAGCACAGCCTACATGGACCTCCTCAGTCTGACATCTGAAGACTCTGCAGTCTATTTCTGTGCAA
GGGGGGGTTACGACGGGAGGGGTTTTGACTACTGGGGATCTGGGACCCCGGTCACCGTCTCCTCAGCTAGCACCAAG
GGCCCATCGGTCTTCCCCCTGGCACCCTCCTCCAAGAGCACCTCTGGGGGCACAGCGGCCCTGGGCTGCCTGGTCAA
GGACTACTTCCCCGAACCGGTGACGGTGTCGTGGAACTCAGGCGCCCTGACCAGCGGCGTGCACACCTTCCCGGCTG
TCCTACAGTCCTCAGGACTCTACTCCCTCAGCAGCGTGGTGACCGTGCCCTCCAGCAGCTTGGGCACCCAGACCTAC
ATCTGCAACGTGAATCACAAGCCCAGCAACACCAAGGTGGACAAGAGAGTTGAGCCCAAATCTTGTGACAAAACTCA
CACATGCCCACCGTGCCCAGCACCTGAAGCCGCGGGGGCACCGTCAGTCTTCCTCTTCCCCCCAAAACCCAAGGACA
CCCTCATGATCTCCCGGACCCCTGAGGTCACATGCGTGGTGGTGGACGTGAGCCACGAAGACCCTGAGGTCAAGTTC
AACTGGTACGTGGACGGCGTGGAGGTGCATAATGCCAAGACAAAGCCGCGGGAGGAGCAGTACAACAGCACGTACCG
TGTGGTCAGCGTCCTCACCGTCCTGCACCAGGACTGGCTGAATGGCAAGGAGTACAAGTGCGCGGTCTCCAACAAAG
CCCTCCCAGCCCCCATCGAGAAAACCATCTCCAAAGCCAAAGGGCAGCCCCGAGAACCACAGGTGTACACCCTGCCC
CCATCCCGGGATGAGCTGACCAAGAACCAGGTCAGCCTGACCTGCCTGGTCAAAGGCTTCTATCCCAGCGACATCGC
CGTGGAGTGGGAGAGCAATGGGCAGCCGGAGAACAACTACAAGACCACGCCTCCCGTGCTGGACTCCGACGGCTCCT
TCTTCCTCTATAGCAAGCTCACCGTGGACAAGAGCAGGTGGCAGCAGGGGAACGTCTTCTCATGCTCCGTGATGCAT
GAGGCTCTGCACAACCACTACACGCAGAAGAGCCTCTCCCTGTCTCCGGGTGGCGGTGGAGGGTCCGGCGGTGGTGG
ATCCGAGGTGCAGCTGTTGGAGTCTGGGGGAGGCTTGGTACAGCCTGGGGGGTCCCTGAGACTCTCCTGTGCAGCCT
CTGGATTCTCCTTCAGTAGCGGGTACGACATGTGCTGGGTCCGCCAGGCTCCAGGGAAGGGGCTGGAGTGGATCGCA
TGCATTGCTGCTGGTAGTGCTGGTATCACTTACGACGCGAACTGGGCGAAAGGCCGGTTCACCATCTCCAGAGACAA
TTCCAAGAACACGCTGTATCTGCAAATGAACAGCCTGAGAGCCGAGGACACGGCCGTATATTACTGTGCGAGATCGG
CGTTTTCGTTCGACTACGCCATGGACCTCTGGGGCCAGGGAACCCTGGTCACCGTCTCGAGCGGTGGAGGCGGATCT
GGCGGAGGTGGTTCCGGCGGTGGCGGCTCCGGTGGAGGCGGCTCTGACATCCAGATGACCCAGTCTCCTTCCACCCT
GTCTGCATCTGTAGGAGACAGAGTCACCATCACTTGCCAGGCCAGTCAGAGCATTAGTTCCCACTTAAACTGGTATC
AGCAGAAACCAGGGAAAGCCCCTAAGCTCCTGATCTATAAGGCATCCACTCTGGCATCTGGGGTCCCATCAAGGTTC
AGCGGCAGTGGATCTGGGACAGAATTTACTCTCACCATCAGCAGCCTGCAGCCTGATGATTTTGCAACTTATTACTG
CCAACAGGGTTATAGTTGGGGTAATGTTGATAATGTTTTCGGCGGAGGGACCAAGGTGGAGATCAAAGGCGGTGGAG
GGTCCGGCGGTGGTGGCTCCGGACGGTCGCTGGTGGAGTCTGGGGGAGGCTTGGTCCAGCCTGGGGGGTCCCTGAGA
CTCTCCTGTACTGCCTCTGGATTCACCATCAGTAGCTACCACATGCAGTGGGTCCGCCAGGCTCCAGGGAAGGGGCT
GGAGTACATCGGAACCATTAGTAGTGGTGGTAATGTATACTACGCAAGCTCCGCTAGAGGCAGATTCACCATCTCCA
GACCCTCGTCCAAGAACACGGTGGATCTTCAAATGAACAGCCTGAGAGCCGAGGACACGGCTGTGTATTACTGTGCG
AGAGACTCTGGTTATAGTGATCCTATGTGGGGCCAGGGAACCCTGGTCACCGTCTCTTCAGGCGGTGGCGGTAGTGG
GGGAGGCGGTTCTGGCGGCGGAGGGTCCGGCGGTGGAGGATCAGACGTTGTGATGACCCAGTCTCCATCTTCCGTGT
CTGCATCTGTAGGAGACAGAGTCACCATCACCTGTCAGGCCAGTCAGAACATTAGGACTTACTTATCCTGGTATCAG
CAGAAACCAGGGAAAGCCCCTAAGCTCCTGATCTATGCTGCAGCCAATCTGGCATCTGGGGTCCCATCAAGGTTCAG
CGGCAGTGGATCTGGGACAGATTTCACTCTCACCATCAGCGACCTGGAGCCTGGCGATGCTGCAACTTACTATTGTC
AGTCTACCTATCTTGGTACTGATTATGTTGGCGGTGCTTTCGGCGGAGGGACCAAGGTGGAGATCAAATGA
>SEQ ID 122 SI-51E1 chain A aa
DVVMTQSPSTLSASVGDRVTINCQASESISSWLAWYQQKPGKAPKLLIYEASKLASGVPSRFSGSGSGTEFTLTISS
LQPDDFATYYCQGYFYFISRTYVNSFGGGTKVEIKGGGGSGGGGSGGGGSGGGGSEVQLVESGGGLVQPGGSLRLSC
AASGFTISTNAMSWVRQAPGKGLEWIGVITGRDITYYASWAKGRFTISRDNSKNTLYLQMNSLRAEDTAVYYCARDG
GSSAITSNNIWGQGTLVTVSTGGGGSGGGGSQVQLQQSGPELEKPGASVKISCKASGYSFTGYTMNWVKQSHGKSLE
WIGLITPYNGASSYNQKFRGKATLTVDKSSSTAYMDLLSLTSEDSAVYFCARGGYDGRGFDYWGSGTPVTVSSASTK
GPSVFPLAPSSKSTSGGTAALGCLVKDYFPEPVTVSWNSGALTSGVHTFPAVLQSSGLYSLSSVVTVPSSSLGTQTY
ICNVNHKPSNTKVDKRVEPKSCDKTHTCPPCPAPEAAGAPSVFLFPPKPKDTLMISRTPEVTCVVVDVSHEDPEVKF
NWYVDGVEVHNAKTKPREEQYNSTYRVVSVLTVLHQDWLNGKEYKCAVSNKALPAPIEKTISKAKGQPREPQVYTLP
PSRDELTKNQVSLTCLVKGFYPSDIAVEWESNGQPENNYKTTPPVLDSDGSFFLYSKLTVDKSRWQQGNVFSCSVMH
EALHNHYTQKSLSLSPGGGGGSGGGGSEVQLLESGGGLVQPGGSLRLSCAASGFSFSSGYDMCWVRQAPGKGLEWIA
CIAAGSAGITYDANWAKGRFTISRDNSKNTLYLQMNSLRAEDTAVYYCARSAFSFDYAMDLWGQGTLVTVSSGGGGS
GGGGSGGGGSGGGGSDIQMTQSPSTLSASVGDRVTITCQASQSISSHLNWYQQKPGKAPKLLIYKASTLASGVPSRF
SGSGSGTEFTLTISSLQPDDFATYYCQQGYSWGNVDNVFGGGTKVEIKGGGGSGGGGSGRSLVESGGGLVQPGGSLR
LSCTASGFTISSYHMQWVRQAPGKGLEYIGTISSGGNVYYASSARGRFTISRPSSKNTVDLQMNSLRAEDTAVYYCA
RDSGYSDPMWGQGTLVTVSSGGGGSGGGGSGGGGSGGGGSDVVMTQSPSSVSASVGDRVTITCQASQNIRTYLSWYQ
QKPGKAPKLLIYAAANLASGVPSRFSGSGSGTDFTLTISDLEPGDAATYYCQSTYLGTDYVGGAFGGGTKVEIK
>SEQ ID 123 SI-51E1 and SI-51E4 chain B nt
GACATCGAGCTCACTCAGTCTCCAGCAATCATGTCTGCATCTCCAGGGGAGAAGGTCACCATGACCTGCAGTGCCAG
CTCAAGTGTAAGTTACATGCACTGGTACCAGCAGAAGTCAGGCACCTCCCCCAAAAGATGGATTTATGACACATCCA
AACTGGCTTCTGGAGTCCCAGGTCGCTTCAGTGGCAGTGGGTCTGGAAACTCTTACTCTCTCACAATCAGCAGCGTG
GAGGCTGAAGATGATGCAACTTATTACTGCCAGCAGTGGAGTAAGCACCCTCTCACGTTCGGATCCGGGACCAAGGT
GGAAATCAAACGTACGGTGGCTGCACCATCTGTCTTCATCTTCCCGCCATCTGATGAGCAGTTGAAATCTGGAACTG
CCTCTGTTGTGTGCCTGCTGAATAACTTCTATCCCAGAGAGGCCAAAGTACAGTGGAAGGTGGATAACGCCCTCCAA
TCGGGTAACTCCCAGGAGAGTGTCACAGAGCAGGACAGCAAGGACAGCACCTACAGCCTCAGCAGCACCCTGACGCT
GAGCAAAGCAGACTACGAGAAACACAAAGTCTACGCCTGCGAAGTCACCCATCAGGGCCTGAGCTCGCCCGTCACAA
AGAGCTTCAACAGGGGAGAGTGTTAG
>SEQ ID 124 SI-51E1 and SI-51E4 chain B aa
DIELTQSPAIMSASPGEKVTMTCSASSSVSYMHWYQQKSGTSPKRWIYDTSKLASGVPGRFSGSGSGNSYSLTISSV
EAEDDATYYCQQWSKHPLTFGSGTKVEIKRTVAAPSVFIFPPSDEQLKSGTASVVCLLNNFYPREAKVQWKVDNALQ
SGNSQESVTEQDSKDSTYSLSSTLTLSKADYEKHKVYACEVTHQGLSSPVTKSFNRGEC
>SEQ ID 125 SI-51E4 chain A nt
GACGTCGTGATGACCCAGTCTCCTTCCACCCTGTCTGCATCTGTAGGAGACAGAGTCACCATCAATTGCCAAGCCAG
TGAGAGCATTAGCAGTTGGTTAGCCTGGTATCAGCAGAAACCAGGGAAAGCCCCTAAGCTCCTGATCTATGAAGCAT
CCAAACTGGCATCTGGGGTCCCATCAAGGTTCAGCGGCAGTGGATCTGGGACAGAATTTACTCTCACCATCAGCAGC
CTGCAGCCTGATGATTTTGCAACTTATTACTGCCAAGGCTATTTTTATTTTATTAGTCGTACTTATGTAAATTCTTT
CGGCTGTGGGACCAAGGTGGAGATCAAAGGTGGAGGCGGTTCAGGCGGAGGTGGAAGTGGTGGTGGCGGCTCTGGAG
GCGGCGGATCTGAGGTGCAGCTGGTGGAGTCTGGGGGAGGCTTGGTCCAGCCTGGGGGGTCCCTGAGACTCTCCTGT
GCAGCCTCTGGATTCACCATCAGTACCAATGCAATGAGCTGGGTCCGCCAGGCTCCAGGGAAGTGCCTGGAGTGGAT
CGGAGTCATTACTGGTCGTGATATCACATACTACGCGAGCTGGGCGAAAGGCAGATTCACCATCTCCAGAGACAATT
CCAAGAACACGCTGTATCTTCAAATGAACAGCCTGAGAGCCGAGGACACGGCTGTGTATTACTGTGCGAGAGACGGT
GGTTCTTCTGCTATTACTAGTAACAACATTTGGGGCCAGGGAACCCTGGTCACCGTGTCGACAGGCGGTGGAGGGTC
CGGCGGTGGTGGATCACAGGTACAACTGCAGCAGTCTGGGCCTGAGCTGGAGAAGCCTGGCGCTTCAGTGAAGATAT
CCTGCAAGGCTTCTGGTTACTCATTCACTGGCTACACCATGAACTGGGTGAAGCAGAGCCATGGAAAGAGCCTTGAG
TGGATTGGACTTATTACTCCTTACAATGGTGCTTCTAGCTACAACCAGAAGTTCAGGGGCAAGGCCACATTAACTGT
AGACAAGTCATCCAGCACAGCCTACATGGACCTCCTCAGTCTGACATCTGAAGACTCTGCAGTCTATTTCTGTGCAA
GGGGGGGTTACGACGGGAGGGGTTTTGACTACTGGGGATCTGGGACCCCGGTCACCGTCTCCTCAGCTAGCACCAAG
GGCCCATCGGTCTTCCCCCTGGCACCCTCCTCCAAGAGCACCTCTGGGGGCACAGCGGCCCTGGGCTGCCTGGTCAA
GGACTACTTCCCCGAACCGGTGACGGTGTCGTGGAACTCAGGCGCCCTGACCAGCGGCGTGCACACCTTCCCGGCTG
TCCTACAGTCCTCAGGACTCTACTCCCTCAGCAGCGTGGTGACCGTGCCCTCCAGCAGCTTGGGCACCCAGACCTAC
ATCTGCAACGTGAATCACAAGCCCAGCAACACCAAGGTGGACAAGAGAGTTGAGCCCAAATCTTGTGACAAAACTCA
CACATGCCCACCGTGCCCAGCACCTGAAGCCGCGGGGGGACCGTCAGTCTTCCTCTTCCCCCCAAAACCCAAGGACA
CCCTCATGATCTCCCGGACCCCTGAGGTCACATGCGTGGTGGTGGACGTGAGCCACGAAGACCCTGAGGTCAAGTTC
AACTGGTACGTGGACGGCGTGGAGGTGCATAATGCCAAGACAAAGCCGCGGGAGGAGCAGTACGCCAGCACGTACCG
TGTGGTCAGCGTCCTCACCGTCCTGCACCAGGACTGGCTGAATGGCAAGGAGTACAAGTGCGCGGTCTCCAACAAAG
CCCTCCCAGCCCCCATCGAGAAAACCATCTCCAAAGCCAAAGGGCAGCCCCGAGAACCACAGGTGTACACCCTGCCC
CCATCCCGGGATGAGCTGACCAAGAACCAGGTCAGCCTGACCTGCCTGGTCAAAGGCTTCTATCCCAGCGACATCGC
CGTGGAGTGGGAGAGCAATGGGCAGCCGGAGAACAACTACAAGACCACGCCTCCCGTGCTGGACTCCGACGGCTCCT
TCTTCCTCTATAGCAAGCTCACCGTGGACAAGAGCAGGTGGCAGCAGGGGAACGTCTTCTCATGCTCCGTGATGCAT
GAGGCTCTGCACAACCACTACACGCAGAAGAGCCTCTCCCTGTCTCCGGGTGGCGGTGGAGGGTCCGGCGGTGGTGG
ATCCGAGGTGCAGCTGTTGGAGTCTGGGGGAGGCTTGGTACAGCCTGGGGGGTCCCTGAGACTCTCCTGTGCAGCCT
CTGGATTCTCCTTCAGTAGCGGGTACGACATGTGCTGGGTCCGCCAGGCTCCAGGGAAGTGCCTGGAGTGGATCGCA
TGCATTGCTGCTGGTAGTGCTGGTATCACTTACGACGCGAACTGGGCGAAAGGCCGGTTCACCATCTCCAGAGACAA
TTCCAAGAACACGCTGTATCTGCAAATGAACAGCCTGAGAGCCGAGGACACGGCCGTATATTACTGTGCGAGATCGG
CGTTTTCGTTCGACTACGCCATGGACCTCTGGGGCCAGGGAACCCTGGTCACCGTCTCGAGCGGTGGAGGCGGTTCA
GGCGGAGGTGGAAGTGGTGGTGGCGGCTCTGGAGGCGGCGGATCTGACATCCAGATGACCCAGTCTCCTTCCACCCT
GTCTGCATCTGTAGGAGACAGAGTCACCATCACTTGCCAGGCCAGTCAGAGCATTAGTTCCCACTTAAACTGGTATC
AGCAGAAACCAGGGAAAGCCCCTAAGCTCCTGATCTATAAGGCATCCACTCTGGCATCTGGGGTCCCATCAAGGTTC
AGCGGCAGTGGATCTGGGACAGAATTTACTCTCACCATCAGCAGCCTGCAGCCTGATGATTTTGCAACTTATTACTG
CCAACAGGGTTATAGTTGGGGTAATGTTGATAATGTTTTCGGCTGCGGGACCAAGGTGGAGATCAAAGGTGGTGGCG
GCTCTGGAGGAGGAGGGTCCGGACGGTCGCTGGTGGAGTCTGGGGGAGGCTTGGTCCAGCCTGGGGGGTCCCTGAGA
CTCTCCTGTACTGCCTCTGGATTCACCATCAGTAGCTACCACATGCAGTGGGTCCGGCAGGCACCTGGGAAGTGCCT
GGAGTACATCGGAACCATTAGTAGTGGTGGTAATGTATACTACGCAAGCTCCGCTAGAGGCAGATTCACCATCTCCA
GACCCTCGTCCAAGAACACGGTGGATCTTCAAATGAACAGCCTGAGAGCCGAGGACACGGCTGTGTATTACTGTGCG
AGAGACTCTGGTTATAGTGATCCTATGTGGGGCCAGGGAACCCTGGTCACCGTCTCTTCAGGCGGTGGCGGTAGTGG
GGGAGGCGGTTCTGGCGGCGGAGGGTCCGGCGGTGGAGGATCAGACGTTGTGATGACCCAGTCTCCATCTTCCGTGT
CTGCATCTGTAGGAGACAGAGTCACCATCACCTGTCAGGCCAGTCAGAACATTAGGACTTACTTATCCTGGTATCAG
CAGAAACCAGGGAAAGCCCCTAAGCTCCTGATCTATGCTGCAGCCAATCTGGCATCTGGGGTCCCATCAAGGTTCAG
CGGCAGTGGATCTGGGACAGATTTCACTCTCACCATCAGCGACTTGGAACCTGGCGATGCTGCAACTTACTATTGTC
AGTCTACCTATCTTGGTACTGATTATGTTGGCGGTGCTTTCGGCTGTGGGACCAAGGTGGAGATCAAATGA
>SEQ ID 126 SI-51E4 chain A aa
DVVMTQSPSTLSASVGDRVTINCQASESISSWLAWYQQKPGKAPKLLIYEASKLASGVPSRFSGSGSGTEFTLTISS
LQPDDFATYYCQGYFYFISRTYVNSFGCGTKVEIKGGGGSGGGGSGGGGSGGGGSEVQLVESGGGLVQPGGSLRLSC
AASGETISTNAMSWVRQAPGKCLEWIGVITGRDITYYASWAKGRFTISRDNSKNTLYLQMNSLRAEDTAVYYCARDG
GSSAITSNNIWGQGTLVTVSTGGGGSGGGGSQVQLQQSGPELEKPGASVKISCKASGYSFTGYTMNWVKQSHGKSLE
WIGLITPYNGASSYNQKFRGKATLTVDKSSSTAYMDLLSLTSEDSAVYFCARGGYDGRGFDYWGSGTPVTVSSASTK
GPSVFPLAPSSKSTSGGTAALGCLVKDYFPEPVTVSWNSGALTSGVHTFPAVLQSSGLYSLSSVVTVPSSSLGTQTY
ICNVNHKPSNTKVDKRVEPKSCDKTHTCPPCPAPEAAGGPSVFLFPPKPKDTLMISRTPEVTCVVVDVSHEDPEVKF
NWYVDGVEVHNAKTKPREEQYASTYRVVSVLTVLHQDWLNGKEYKCAVSNKALPAPIEKTISKAKGQPREPQVYTLP
PSRDELTKNQVSLTCLVKGFYPSDIAVEWESNGQPENNYKTTPPVLDSDGSFFLYSKLTVDKSRWQQGNVFSCSVMH
EALHNHYTQKSLSLSPGGGGGSGGGGSEVQLLESGGGLVQPGGSLRLSCAASGFSFSSGYDMCWVRQAPGKCLEWIA
CIAAGSAGITYDANWAKGRFTISRDNSKNTLYLQMNSLRAEDTAVYYCARSAFSFDYAMDLWGQGTLVTVSSGGGGS
GGGGSGGGGSGGGGSDIQMTQSPSTLSASVGDRVTITCQASQSISSHLNWYQQKPGKAPKLLIYKASTLASGVPSRF
SGSGSGTEFTLTISSLQPDDFATYYCQQGYSWGNVDNVFGCGTKVEIKGGGGSGGGGSGRSLVESGGGLVQPGGSLR
LSCTASGFTISSYHMQWVRQAPGKCLEYIGTISSGGNVYYASSARGRFTISRPSSKNTVDLQMNSLRAEDTAVYYCA
RDSGYSDPMWGQGTLVTVSSGGGGSGGGGSGGGGSGGGGSDVVMTQSPSSVSASVGDRVTITCQASQNIRTYLSWYQ
QKPGKAPKLLIYAAANLASGVPSRFSGSGSGTDFTLTISDLEPGDAATYYCQSTYLGTDYVGGAFGCGTKVEIK
>SEQ ID 127 SI-52E1 chain A nt
GACGTCGTGATGACCCAGTCTCCTTCCACCCTGTCTGCATCTGTAGGAGACAGAGTCACCATCAATTGCCAAGCCAG
TGAGAGCATTAGCAGTTGGTTAGCCTGGTATCAGCAGAAACCAGGGAAAGCCCCTAAGCTCCTGATCTATGAAGCAT
CCAAACTGGCATCTGGGGTCCCATCAAGGTTCAGCGGCAGTGGATCTGGGACAGAATTTACTCTCACCATCAGCAGC
CTGCAGCCTGATGATTTTGCAACTTATTACTGCCAAGGCTATTTTTATTTTATTAGTCGTACTTATGTAAATTCTTT
CGGCGGAGGGACCAAGGTGGAGATCAAAGGCGGTGGCGGTAGTGGGGGAGGCGGTTCTGGCGGCGGAGGGTCCGGCG
GTGGAGGATCAGAGGTGCAGCTGGTGGAGTCTGGGGGAGGCTTGGTCCAGCCTGGGGGGTCCCTGAGACTCTCCTGT
GCAGCCTCTGGATTCACCATCAGTACCAATGCAATGAGCTGGGTCCGCCAGGCTCCAGGGAAGGGGCTGGAGTGGAT
CGGAGTCATTACTGGTCGTGATATCACATACTACGCGAGCTGGGCGAAAGGCAGATTCACCATCTCCAGAGACAATT
CCAAGAACACGCTGTATCTTCAAATGAACAGCCTGAGAGCCGAGGACACGGCTGTGTATTACTGTGCGAGAGACGGT
GGTTCTTCTGCTATTACTAGTAACAACATTTGGGGCCAGGGAACCCTGGTCACCGTGTCGACAGGCGGTGGAGGGTC
CGGCGGTGGTGGATCAGAGGTCCAACTGCTGCAGTCTGGACCTGAGCTGGAGAAGCCTGGCGCTTCAGTGATGATAT
CCTGCAAGGCTTCTGGTTCCTCATTCACTGGCTACAACATGAACTGGGTGAGGCAGAACATTGGAAAGAGCCTTGAA
TGGATTGGAGCTATTGATCCTTACTATGGTGGAACTAGCTACAACCAGAAGTTCAAGGGCAGGGCCACATTGACTGT
AGACAAATCGTCCAGCACAGCCTACATGCACCTCAAGAGCCTGACATCTGAGGACTCTGCAGTCTATTACTGTGTAA
GCGGAATGGAGTACTGGGGTCAAGGAACCTCAGTCACCGTCTCCTCAGCTAGCACCAAGGGCCCATCGGTCTTCCCC
CTGGCACCCTCCTCCAAGAGCACCTCTGGGGGCACAGCGGCCCTGGGCTGCCTGGTCAAGGACTACTTCCCCGAACC
GGTGACGGTGTCGTGGAACTCAGGCGCCCTGACCAGCGGCGTGCACACCTTCCCGGCTGTCCTACAGTCCTCAGGAC
TCTACTCCCTCAGCAGCGTGGTGACCGTGCCCTCCAGCAGCTTGGGCACCCAGACCTACATCTGCAACGTGAATCAC
AAGCCCAGCAACACCAAGGTGGACAAGAGAGTTGAGCCCAAATCTTGTGACAAAACTCACACATGCCCACCGTGCCC
AGCACCTGAAGCCGCGGGGGCACCGTCAGTCTTCCTCTTCCCCCCAAAACCCAAGGACACCCTCATGATCTCCCGGA
CCCCTGAGGTCACATGCGTGGTGGTGGACGTGAGCCACGAAGACCCTGAGGTCAAGTTCAACTGGTACGTGGACGGC
GTGGAGGTGCATAATGCCAAGACAAAGCCGCGGGAGGAGCAGTACAACAGCACGTACCGTGTGGTCAGCGTCCTCAC
CGTCCTGCACCAGGACTGGCTGAATGGCAAGGAGTACAAGTGCGCGGTCTCCAACAAAGCCCTCCCAGCCCCCATCG
AGAAAACCATCTCCAAAGCCAAAGGGCAGCCCCGAGAACCACAGGTGTACACCCTGCCCCCATCCCGGGATGAGCTG
ACCAAGAACCAGGTCAGCCTGACCTGCCTGGTCAAAGGCTTCTATCCCAGCGACATCGCCGTGGAGTGGGAGAGCAA
TGGGCAGCCGGAGAACAACTACAAGACCACGCCTCCCGTGCTGGACTCCGACGGCTCCTTCTTCCTCTATAGCAAGC
TCACCGTGGACAAGAGCAGGTGGCAGCAGGGGAACGTCTTCTCATGCTCCGTGATGCATGAGGCTCTGCACAACCAC
TACACGCAGAAGAGCCTCTCCCTGTCTCCGGGTGGCGGTGGAGGGTCCGGCGGTGGTGGATCCGAGGTGCAGCTGTT
GGAGTCTGGGGGAGGCTTGGTACAGCCTGGGGGGTCCCTGAGACTCTCCTGTGCAGCCTCTGGATTCTCCTTCAGTA
GCGGGTACGACATGTGCTGGGTCCGCCAGGCTCCAGGGAAGGGGCTGGAGTGGATCGCATGCATTGCTGCTGGTAGT
GCTGGTATCACTTACGACGCGAACTGGGCGAAAGGCCGGTTCACCATCTCCAGAGACAATTCCAAGAACACGCTGTA
TCTGCAAATGAACAGCCTGAGAGCCGAGGACACGGCCGTATATTACTGTGCGAGATCGGCGTTTTCGTTCGACTACG
CCATGGACCTCTGGGGCCAGGGAACCCTGGTCACCGTCTCGAGCGGTGGAGGCGGATCTGGCGGAGGTGGTTCCGGC
GGTGGCGGCTCCGGTGGAGGCGGCTCTGACATCCAGATGACCCAGTCTCCTTCCACCCTGTCTGCATCTGTAGGAGA
CAGAGTCACCATCACTTGCCAGGCCAGTCAGAGCATTAGTTCCCACTTAAACTGGTATCAGCAGAAACCAGGGAAAG
CCCCTAAGCTCCTGATCTATAAGGCATCCACTCTGGCATCTGGGGTCCCATCAAGGTTCAGCGGCAGTGGATCTGGG
ACAGAATTTACTCTCACCATCAGCAGCCTGCAGCCTGATGATTTTGCAACTTATTACTGCCAACAGGGTTATAGTTG
GGGTAATGTTGATAATGTTTTCGGCGGAGGGACCAAGGTGGAGATCAAAGGCGGTGGAGGGTCCGGCGGTGGTGGCT
CCGGACGGTCGCTGGTGGAGTCTGGGGGAGGCTTGGTCCAGCCTGGGGGGTCCCTGAGACTCTCCTGTACTGCCTCT
GGATTCACCATCAGTAGCTACCACATGCAGTGGGTCCGCCAGGCTCCAGGGAAGGGGCTGGAGTACATCGGAACCAT
TAGTAGTGGTGGTAATGTATACTACGCAAGCTCCGCTAGAGGCAGATTCACCATCTCCAGACCCTCGTCCAAGAACA
CGGTGGATCTTCAAATGAACAGCCTGAGAGCCGAGGACACGGCTGTGTATTACTGTGCGAGAGACTCTGGTTATAGT
GATCCTATGTGGGGCCAGGGAACCCTGGTCACCGTCTCTTCAGGCGGTGGCGGTAGTGGGGGAGGCGGTTCTGGCGG
CGGAGGGTCCGGCGGTGGAGGATCAGACGTTGTGATGACCCAGTCTCCATCTTCCGTGTCTGCATCTGTAGGAGACA
GAGTCACCATCACCTGTCAGGCCAGTCAGAACATTAGGACTTACTTATCCTGGTATCAGCAGAAACCAGGGAAAGCC
CCTAAGCTCCTGATCTATGCTGCAGCCAATCTGGCATCTGGGGTCCCATCAAGGTTCAGCGGCAGTGGATCTGGGAC
AGATTTCACTCTCACCATCAGCGACCTGGAGCCTGGCGATGCTGCAACTTACTATTGTCAGTCTACCTATCTTGGTA
CTGATTATGTTGGCGGTGCTTTCGGCGGAGGGACCAAGGTGGAGATCAAATGA
>SEQ ID 128 SI-52E1 chain A aa
DVVMTQSPSTLSASVGDRVTINCQASESISSWLAWYQQKPGKAPKLLIYEASKLASGVPSRFSGSGSGTEFTLTISS
LQPDDFATYYCQGYFYFISRTYVNSFGGGTKVEIKGGGGSGGGGSGGGGSGGGGSEVQLVESGGGLVQPGGSLRLSC
AASGFTISTNAMSWVRQAPGKGLEWIGVITGRDITYYASWAKGRFTISRDNSKNTLYLQMNSLRAEDTAVYYCARDG
GSSAITSNNIWGQGTLVTVSTGGGGSGGGGSEVQLLQSGPELEKPGASVMISCKASGSSFTGYNMNWVRQNIGKSLE
WIGAIDPYYGGTSYNQKFKGRATLTVDKSSSTAYMHLKSLTSEDSAVYYCVSGMEYWGQGTSVTVSSASTKGPSVFP
LAPSSKSTSGGTAALGCLVKDYFPEPVTVSWNSGALTSGVHTFPAVLQSSGLYSLSSVVTVPSSSLGTQTYICNVNH
KPSNTKVDKRVEPKSCDKTHTCPPCPAPEAAGAPSVFLFPPKPKDTLMISRTPEVTCVVVDVSHEDPEVKFNWYVDG
VEVHNAKTKPREEQYNSTYRVVSVLTVLHQDWLNGKEYKCAVSNKALPAPIEKTISKAKGQPREPQVYTLPPSRDEL
TKNQVSLTCLVKGFYPSDIAVEWESNGQPENNYKTTPPVLDSDGSFFLYSKLTVDKSRWQQGNVFSCSVMHEALHNH
YTQKSLSLSPGGGGGSGGGGSEVQLLESGGGLVQPGGSLRLSCAASGFSFSSGYDMCWVRQAPGKGLEWIACIAAGS
AGITYDANWAKGRFTISRDNSKNTLYLQMNSLRAEDTAVYYCARSAFSFDYAMDLWGQGTLVTVSSGGGGSGGGGSG
GGGSGGGGSDIQMTQSPSTLSASVGDRVTITCQASQSISSHLNWYQQKPGKAPKLLIYKASTLASGVPSRFSGSGSG
TEFTLTISSLQPDDFATYYCQQGYSWGNVDNVFGGGTKVEIKGGGGSGGGGSGRSLVESGGGLVQPGGSLRLSCTAS
GFTISSYHMQWVRQAPGKGLEYIGTISSGGNVYYASSARGRFTISRPSSKNTVDLQMNSLRAEDTAVYYCARDSGYS
DPMWGQGTLVTVSSGGGGSGGGGSGGGGSGGGGSDVVMTQSPSSVSASVGDRVTITCQASQNIRTYLSWYQQKPGKA
PKLLIYAAANLASGVPSRFSGSGSGTDFTLTISDLEPGDAATYYCQSTYLGTDYVGGAFGGGTKVEIK
>SEQ ID 129 SI-52E1 and SI-52E4 chain B nt
GAAATAGTGATGACGCAGTCTCCAGCCACCCTGTCTGTGTCTCCAGGGGAAAGAGCCACCCTCTCCTGCAGATCTAG
TCAGAGTCTTGTACACCGTAATGGAAACACCTATTTACATTGGTACCTGCAGAAGCCAGGCCAGTCTCCAAAGCTCC
TGATTCACAAAGTTTCCAACCGATTTTCTGGGGTCCCAGACAGGTTCAGTGGCAGTGGATCAGGGACAGATTTCACA
CTCAAGATCAGCAGAGTGGAGGCTGAGGATCTGGGAGTTTATTTCTGTTCTCAAAGTACACATGTTCCTCCGCTCAC
GTTCGGTGCTGGGACCAAGCTGGAGCTGAAACGTACGGTGGCTGCACCATCTGTCTTCATCTTCCCGCCATCTGATG
AGCAGTTGAAATCTGGAACTGCCTCTGTTGTGTGCCTGCTGAATAACTTCTATCCCAGAGAGGCCAAAGTACAGTGG
AAGGTGGATAACGCCCTCCAATCGGGTAACTCCCAGGAGAGTGTCACAGAGCAGGACAGCAAGGACAGCACCTACAG
CCTCAGCAGCACCCTGACGCTGAGCAAAGCAGACTACGAGAAACACAAAGTCTACGCCTGCGAAGTCACCCATCAGG
GCCTGAGCTCGCCCGTCACAAAGAGCTTCAACAGGGGAGAGTGTTAG
>SEQ ID 130 SI-52E1 and SI-52E4 chain B aa
EIVMTQSPATLSVSPGERATLSCRSSQSLVHRNGNTYLHWYLQKPGQSPKLLIHKVSNRFSGVPDRFSGSGSGTDFT
LKISRVEAEDLGVYFCSQSTHVPPLTFGAGTKLELKRTVAAPSVFIFPPSDEQLKSGTASVVCLLNNFYPREAKVQW
KVDNALQSGNSQESVTEQDSKDSTYSLSSTLTLSKADYEKHKVYACEVTHQGLSSPVTKSFNRGEC
>SEQ ID 131 SI-52E4 chain A nt
GACGTCGTGATGACCCAGTCTCCTTCCACCCTGTCTGCATCTGTAGGAGACAGAGTCACCATCAATTGCCAAGCCAG
TGAGAGCATTAGCAGTTGGTTAGCCTGGTATCAGCAGAAACCAGGGAAAGCCCCTAAGCTCCTGATCTATGAAGCAT
CCAAACTGGCATCTGGGGTCCCATCAAGGTTCAGCGGCAGTGGATCTGGGACAGAATTTACTCTCACCATCAGCAGC
CTGCAGCCTGATGATTTTGCAACTTATTACTGCCAAGGCTATTTTTATTTTATTAGTCGTACTTATGTAAATTCTTT
CGGCTGTGGGACCAAGGTGGAGATCAAAGGTGGAGGCGGTTCAGGCGGAGGTGGAAGTGGTGGTGGCGGCTCTGGAG
GCGGCGGATCTGAGGTGCAGCTGGTGGAGTCTGGGGGAGGCTTGGTCCAGCCTGGGGGGTCCCTGAGACTCTCCTGT
GCAGCCTCTGGATTCACCATCAGTACCAATGCAATGAGCTGGGTCCGCCAGGCTCCAGGGAAGTGCCTGGAGTGGAT
CGGAGTCATTACTGGTCGTGATATCACATACTACGCGAGCTGGGCGAAAGGCAGATTCACCATCTCCAGAGACAATT
CCAAGAACACGCTGTATCTTCAAATGAACAGCCTGAGAGCCGAGGACACGGCTGTGTATTACTGTGCGAGAGACGGT
GGTTCTTCTGCTATTACTAGTAACAACATTTGGGGCCAGGGAACCCTGGTCACCGTGTCGACAGGCGGTGGAGGGTC
CGGCGGTGGTGGATCAGAGGTCCAACTGCTGCAGTCTGGACCTGAGCTGGAGAAGCCTGGCGCTTCAGTGATGATAT
CCTGCAAGGCTTCTGGTTCCTCATTCACTGGCTACAACATGAACTGGGTGAGGCAGAACATTGGAAAGAGCCTTGAA
TGGATTGGAGCTATTGATCCTTACTATGGTGGAACTAGCTACAACCAGAAGTTCAAGGGCAGGGCCACATTGACTGT
AGACAAATCGTCCAGCACAGCCTACATGCACCTCAAGAGCCTGACATCTGAGGACTCTGCAGTCTATTACTGTGTAA
GCGGAATGGAGTACTGGGGTCAAGGAACCTCAGTCACCGTCTCCTCAGCTAGCACCAAGGGCCCATCGGTCTTCCCC
CTGGCACCCTCCTCCAAGAGCACCTCTGGGGGCACAGCGGCCCTGGGCTGCCTGGTCAAGGACTACTTCCCCGAACC
GGTGACGGTGTCGTGGAACTCAGGCGCCCTGACCAGCGGCGTGCACACCTTCCCGGCTGTCCTACAGTCCTCAGGAC
TCTACTCCCTCAGCAGCGTGGTGACCGTGCCCTCCAGCAGCTTGGGCACCCAGACCTACATCTGCAACGTGAATCAC
AAGCCCAGCAACACCAAGGTGGACAAGAGAGTTGAGCCCAAATCTTGTGACAAAACTCACACATGCCCACCGTGCCC
AGCACCTGAAGCCGCGGGGGGACCGTCAGTCTTCCTCTTCCCCCCAAAACCCAAGGACACCCTCATGATCTCCCGGA
CCCCTGAGGTCACATGCGTGGTGGTGGACGTGAGCCACGAAGACCCTGAGGTCAAGTTCAACTGGTACGTGGACGGC
GTGGAGGTGCATAATGCCAAGACAAAGCCGCGGGAGGAGCAGTACGCCAGCACGTACCGTGTGGTCAGCGTCCTCAC
CGTCCTGCACCAGGACTGGCTGAATGGCAAGGAGTACAAGTGCGCGGTCTCCAACAAAGCCCTCCCAGCCCCCATCG
AGAAAACCATCTCCAAAGCCAAAGGGCAGCCCCGAGAACCACAGGTGTACACCCTGCCCCCATCCCGGGATGAGCTG
ACCAAGAACCAGGTCAGCCTGACCTGCCTGGTCAAAGGCTTCTATCCCAGCGACATCGCCGTGGAGTGGGAGAGCAA
TGGGCAGCCGGAGAACAACTACAAGACCACGCCTCCCGTGCTGGACTCCGACGGCTCCTTCTTCCTCTATAGCAAGC
TCACCGTGGACAAGAGCAGGTGGCAGCAGGGGAACGTCTTCTCATGCTCCGTGATGCATGAGGCTCTGCACAACCAC
TACACGCAGAAGAGCCTCTCCCTGTCTCCGGGTGGCGGTGGAGGGTCCGGCGGTGGTGGATCCGAGGTGCAGCTGTT
GGAGTCTGGGGGAGGCTTGGTACAGCCTGGGGGGTCCCTGAGACTCTCCTGTGCAGCCTCTGGATTCTCCTTCAGTA
GCGGGTACGACATGTGCTGGGTCCGCCAGGCTCCAGGGAAGTGCCTGGAGTGGATCGCATGCATTGCTGCTGGTAGT
GCTGGTATCACTTACGACGCGAACTGGGCGAAAGGCCGGTTCACCATCTCCAGAGACAATTCCAAGAACACGCTGTA
TCTGCAAATGAACAGCCTGAGAGCCGAGGACACGGCCGTATATTACTGTGCGAGATCGGCGTTTTCGTTCGACTACG
CCATGGACCTCTGGGGCCAGGGAACCCTGGTCACCGTCTCGAGCGGTGGAGGCGGTTCAGGCGGAGGTGGAAGTGGT
GGTGGCGGCTCTGGAGGCGGCGGATCTGACATCCAGATGACCCAGTCTCCTTCCACCCTGTCTGCATCTGTAGGAGA
CAGAGTCACCATCACTTGCCAGGCCAGTCAGAGCATTAGTTCCCACTTAAACTGGTATCAGCAGAAACCAGGGAAAG
CCCCTAAGCTCCTGATCTATAAGGCATCCACTCTGGCATCTGGGGTCCCATCAAGGTTCAGCGGCAGTGGATCTGGG
ACAGAATTTACTCTCACCATCAGCAGCCTGCAGCCTGATGATTTTGCAACTTATTACTGCCAACAGGGTTATAGTTG
GGGTAATGTTGATAATGTTTTCGGCTGCGGGACCAAGGTGGAGATCAAAGGTGGTGGCGGCTCTGGAGGAGGAGGGT
CCGGACGGTCGCTGGTGGAGTCTGGGGGAGGCTTGGTCCAGCCTGGGGGGTCCCTGAGACTCTCCTGTACTGCCTCT
GGATTCACCATCAGTAGCTACCACATGCAGTGGGTCCGGCAGGCACCTGGGAAGTGCCTGGAGTACATCGGAACCAT
TAGTAGTGGTGGTAATGTATACTACGCAAGCTCCGCTAGAGGCAGATTCACCATCTCCAGACCCTCGTCCAAGAACA
CGGTGGATCTTCAAATGAACAGCCTGAGAGCCGAGGACACGGCTGTGTATTACTGTGCGAGAGACTCTGGTTATAGT
GATCCTATGTGGGGCCAGGGAACCCTGGTCACCGTCTCTTCAGGCGGTGGCGGTAGTGGGGGAGGCGGTTCTGGCGG
CGGAGGGTCCGGCGGTGGAGGATCAGACGTTGTGATGACCCAGTCTCCATCTTCCGTGTCTGCATCTGTAGGAGACA
GAGTCACCATCACCTGTCAGGCCAGTCAGAACATTAGGACTTACTTATCCTGGTATCAGCAGAAACCAGGGAAAGCC
CCTAAGCTCCTGATCTATGCTGCAGCCAATCTGGCATCTGGGGTCCCATCAAGGTTCAGCGGCAGTGGATCTGGGAC
AGATTTCACTCTCACCATCAGCGACTTGGAACCTGGCGATGCTGCAACTTACTATTGTCAGTCTACCTATCTTGGTA
CTGATTATGTTGGCGGTGCTTTCGGCTGTGGGACCAAGGTGGAGATCAAATGA
>SEQ ID 132 SI-52E4 chain A aa
DVVMTQSPSTLSASVGDRVTINCQASESISSWLAWYQQKPGKAPKLLIYEASKLASGVPSRFSGSGSGTEFTLTISS
LQPDDFATYYCQGYFYFISRTYVNSFGCGTKVEIKGGGGSGGGGSGGGGSGGGGSEVQLVESGGGLVQPGGSLRLSC
AASGFTISTNAMSWVRQAPGKCLEWIGVITGRDITYYASWAKGRFTISRDNSKNTLYLQMNSLRAEDTAVYYCARDG
GSSAITSNNIWGQGTLVTVSTGGGGSGGGGSEVQLLQSGPELEKPGASVMISCKASGSSFTGYNMNWVRQNIGKSLE
WIGAIDPYYGGTSYNQKFKGRATLTVDKSSSTAYMHLKSLTSEDSAVYYCVSGMEYWGQGTSVTVSSASTKGPSVFP
LAPSSKSTSGGTAALGCLVKDYFPEPVTVSWNSGALTSGVHTFPAVLQSSGLYSLSSVVTVPSSSLGTQTYICNVNH
KPSNTKVDKRVEPKSCDKTHTCPPCPAPEAAGGPSVFLFPPKPKDTLMISRTPEVTCVVVDVSHEDPEVKFNWYVDG
VEVHNAKTKPREEQYASTYRVVSVLTVLHQDWLNGKEYKCAVSNKALPAPIEKTISKAKGQPREPQVYTLPPSRDEL
TKNQVSLTCLVKGFYPSDIAVEWESNGQPENNYKTTPPVLDSDGSFFLYSKLTVDKSRWQQGNVFSCSVMHEALHNH
YTQKSLSLSPGGGGGSGGGGSEVQLLESGGGLVQPGGSLRLSCAASGFSFSSGYDMCWVRQAPGKCLEWIACIAAGS
AGITYDANWAKGRFTISRDNSKNTLYLQMNSLRAEDTAVYYCARSAFSFDYAMDLWGQGTLVTVSSGGGGSGGGGSG
GGGSGGGGSDIQMTQSPSTLSASVGDRVTITCQASQSISSHLNWYQQKPGKAPKLLIYKASTLASGVPSRFSGSGSG
TEFTLTISSLQPDDFATYYCQQGYSWGNVDNVFGCGTKVEIKGGGGSGGGGSGRSLVESGGGLVQPGGSLRLSCTAS
GFTISSYHMQWVRQAPGKCLEYIGTISSGGNVYYASSARGRFTISRPSSKNTVDLQMNSLRAEDTAVYYCARDSGYS
DPMWGQGTLVTVSSGGGGSGGGGSGGGGSGGGGSDVVMTQSPSSVSASVGDRVTITCQASQNIRTYLSWYQQKPGKA
PKLLIYAAANLASGVPSRFSGSGSGTDFTLTISDLEPGDAATYYCQSTYLGTDYVGGAFGCGTKVEIK
>SEQ ID 133 SI-53E1 chain A nt
GACGTCGTGATGACCCAGTCTCCTTCCACCCTGTCTGCATCTGTAGGAGACAGAGTCACCATCAATTGCCAAGCCAG
TGAGAGCATTAGCAGTTGGTTAGCCTGGTATCAGCAGAAACCAGGGAAAGCCCCTAAGCTCCTGATCTATGAAGCAT
CCAAACTGGCATCTGGGGTCCCATCAAGGTTCAGCGGCAGTGGATCTGGGACAGAATTTACTCTCACCATCAGCAGC
CTGCAGCCTGATGATTTTGCAACTTATTACTGCCAAGGCTATTTTTATTTTATTAGTCGTACTTATGTAAATTCTTT
CGGCGGAGGGACCAAGGTGGAGATCAAAGGCGGTGGCGGTAGTGGGGGAGGCGGTTCTGGCGGCGGAGGGTCCGGCG
GTGGAGGATCAGAGGTGCAGCTGGTGGAGTCTGGGGGAGGCTTGGTCCAGCCTGGGGGGTCCCTGAGACTCTCCTGT
GCAGCCTCTGGATTCACCATCAGTACCAATGCAATGAGCTGGGTCCGCCAGGCTCCAGGGAAGGGGCTGGAGTGGAT
CGGAGTCATTACTGGTCGTGATATCACATACTACGCGAGCTGGGCGAAAGGCAGATTCACCATCTCCAGAGACAATT
CCAAGAACACGCTGTATCTTCAAATGAACAGCCTGAGAGCCGAGGACACGGCTGTGTATTACTGTGCGAGAGACGGT
GGTTCTTCTGCTATTACTAGTAACAACATTTGGGGCCAGGGAACCCTGGTCACCGTGTCGACAGGCGGTGGAGGGTC
CGGCGGTGGTGGATCACAGGTCCAACTGCAGCAGCCTGGGGCTGAGCTGGTGAGGCCTGGGGCTTCAGTGAAGCTGT
CCTGCAAGGCTTCTGGCTACACCTTCACCAGCTACTGGATAAACTGGGTGAAGCAGAGGCCTGGACAAGGCCTTGAG
TGGATCGGAAATATTTATCCTTCTGATAGTTATACTAACTACAATCAAAAGTTCAAGGACAAGGCCACATTGACTGT
AGACAAATCCTCCAGCACAGCCTACATGCAGCTCAGCAGCCCGACATCTGAGGACTCTGCGGTCTATTACTGTACAA
GATCGTGGAGGGGTAACTCCTTTGACTACTGGGGCCAAGGCACCACTCTCACAGTCTCCTCAGCTAGCACCAAGGGC
CCATCGGTCTTCCCCCTGGCACCCTCCTCCAAGAGCACCTCTGGGGGCACAGCGGCCCTGGGCTGCCTGGTCAAGGA
CTACTTCCCCGAACCGGTGACGGTGTCGTGGAACTCAGGCGCCCTGACCAGCGGCGTGCACACCTTCCCGGCTGTCC
TACAGTCCTCAGGACTCTACTCCCTCAGCAGCGTGGTGACCGTGCCCTCCAGCAGCTTGGGCACCCAGACCTACATC
TGCAACGTGAATCACAAGCCCAGCAACACCAAGGTGGACAAGAGAGTTGAGCCCAAATCTTGTGACAAAACTCACAC
ATGCCCACCGTGCCCAGCACCTGAAGCCGCGGGGGCACCGTCAGTCTTCCTCTTCCCCCCAAAACCCAAGGACACCC
TCATGATCTCCCGGACCCCTGAGGTCACATGCGTGGTGGTGGACGTGAGCCACGAAGACCCTGAGGTCAAGTTCAAC
TGGTACGTGGACGGCGTGGAGGTGCATAATGCCAAGACAAAGCCGCGGGAGGAGCAGTACAACAGCACGTACCGTGT
GGTCAGCGTCCTCACCGTCCTGCACCAGGACTGGCTGAATGGCAAGGAGTACAAGTGCGCGGTCTCCAACAAAGCCC
TCCCAGCCCCCATCGAGAAAACCATCTCCAAAGCCAAAGGGCAGCCCCGAGAACCACAGGTGTACACCCTGCCCCCA
TCCCGGGATGAGCTGACCAAGAACCAGGTCAGCCTGACCTGCCTGGTCAAAGGCTTCTATCCCAGCGACATCGCCGT
GGAGTGGGAGAGCAATGGGCAGCCGGAGAACAACTACAAGACCACGCCTCCCGTGCTGGACTCCGACGGCTCCTTCT
TCCTCTATAGCAAGCTCACCGTGGACAAGAGCAGGTGGCAGCAGGGGAACGTCTTCTCATGCTCCGTGATGCATGAG
GCTCTGCACAACCACTACACGCAGAAGAGCCTCTCCCTGTCTCCGGGTGGCGGTGGAGGGTCCGGCGGTGGTGGATC
CGAGGTGCAGCTGTTGGAGTCTGGGGGAGGCTTGGTACAGCCTGGGGGGTCCCTGAGACTCTCCTGTGCAGCCTCTG
GATTCTCCTTCAGTAGCGGGTACGACATGTGCTGGGTCCGCCAGGCTCCAGGGAAGGGGCTGGAGTGGATCGCATGC
ATTGCTGCTGGTAGTGCTGGTATCACTTACGACGCGAACTGGGCGAAAGGCCGGTTCACCATCTCCAGAGACAATTC
CAAGAACACGCTGTATCTGCAAATGAACAGCCTGAGAGCCGAGGACACGGCCGTATATTACTGTGCGAGATCGGCGT
TTTCGTTCGACTACGCCATGGACCTCTGGGGCCAGGGAACCCTGGTCACCGTCTCGAGCGGTGGAGGCGGATCTGGC
GGAGGTGGTTCCGGCGGTGGCGGCTCCGGTGGAGGCGGCTCTGACATCCAGATGACCCAGTCTCCTTCCACCCTGTC
TGCATCTGTAGGAGACAGAGTCACCATCACTTGCCAGGCCAGTCAGAGCATTAGTTCCCACTTAAACTGGTATCAGC
AGAAACCAGGGAAAGCCCCTAAGCTCCTGATCTATAAGGCATCCACTCTGGCATCTGGGGTCCCATCAAGGTTCAGC
GGCAGTGGATCTGGGACAGAATTTACTCTCACCATCAGCAGCCTGCAGCCTGATGATTTTGCAACTTATTACTGCCA
ACAGGGTTATAGTTGGGGTAATGTTGATAATGTTTTCGGCGGAGGGACCAAGGTGGAGATCAAAGGCGGTGGAGGGT
CCGGCGGTGGTGGCTCCGGACGGTCGCTGGTGGAGTCTGGGGGAGGCTTGGTCCAGCCTGGGGGGTCCCTGAGACTC
TCCTGTACTGCCTCTGGATTCACCATCAGTAGCTACCACATGCAGTGGGTCCGCCAGGCTCCAGGGAAGGGGCTGGA
GTACATCGGAACCATTAGTAGTGGTGGTAATGTATACTACGCAAGCTCCGCTAGAGGCAGATTCACCATCTCCAGAC
CCTCGTCCAAGAACACGGTGGATCTTCAAATGAACAGCCTGAGAGCCGAGGACACGGCTGTGTATTACTGTGCGAGA
GACTCTGGTTATAGTGATCCTATGTGGGGCCAGGGAACCCTGGTCACCGTCTCTTCAGGCGGTGGCGGTAGTGGGGG
AGGCGGTTCTGGCGGCGGAGGGTCCGGCGGTGGAGGATCAGACGTTGTGATGACCCAGTCTCCATCTTCCGTGTCTG
CATCTGTAGGAGACAGAGTCACCATCACCTGTCAGGCCAGTCAGAACATTAGGACTTACTTATCCTGGTATCAGCAG
AAACCAGGGAAAGCCCCTAAGCTCCTGATCTATGCTGCAGCCAATCTGGCATCTGGGGTCCCATCAAGGTTCAGCGG
CAGTGGATCTGGGACAGATTTCACTCTCACCATCAGCGACCTGGAGCCTGGCGATGCTGCAACTTACTATTGTCAGT
CTACCTATCTTGGTACTGATTATGTTGGCGGTGCTTTCGGCGGAGGGACCAAGGTGGAGATCAAATGA
>SEQ ID 134 SI-53E1 chain A aa
DVVMTQSPSTLSASVGDRVTINCQASESISSWLAWYQQKPGKAPKLLIYEASKLASGVPSRFSGSGSGTEFTLTISS
LQPDDFATYYCQGYFYFISRTYVNSFGGGTKVEIKGGGGSGGGGSGGGGSGGGGSEVQLVESGGGLVQPGGSLRLSC
AASGFTISTNAMSWVRQAPGKGLEWIGVITGRDITYYASWAKGRFTISRDNSKNTLYLQMNSLRAEDTAVYYCARDG
GSSAITSNNIWGQGTLVTVSTGGGGSGGGGSQVQLQQPGAELVRPGASVKLSCKASGYTFTSYWINWVKQRPGQGLE
WIGNIYPSDSYTNYNQKFKDKATLTVDKSSSTAYMQLSSPTSEDSAVYYCTRSWRGNSFDYWGQGTTLTVSSASTKG
PSVFPLAPSSKSTSGGTAALGCLVKDYFPEPVTVSWNSGALTSGVHTFPAVLQSSGLYSLSSVVTVPSSSLGTQTYI
CNVNHKPSNTKVDKRVEPKSCDKTHTCPPCPAPEAAGAPSVFLFPPKPKDTLMISRTPEVTCVVVDVSHEDPEVKFN
WYVDGVEVHNAKTKPREEQYNSTYRVVSVLTVLHQDWLNGKEYKCAVSNKALPAPIEKTISKAKGQPREPQVYTLPP
SRDELTKNQVSLTCLVKGFYPSDIAVEWESNGQPENNYKTTPPVLDSDGSFFLYSKLTVDKSRWQQGNVFSCSVMHE
ALHNHYTQKSLSLSPGGGGGSGGGGSEVQLLESGGGLVQPGGSLRLSCAASGFSFSSGYDMCWVRQAPGKGLEWIAC
IAAGSAGITYDANWAKGRFTISRDNSKNTLYLQMNSLRAEDTAVYYCARSAFSFDYAMDLWGQGTLVTVSSGGGGSG
GGGSGGGGSGGGGSDIQMTQSPSTLSASVGDRVTITCQASQSISSHLNWYQQKPGKAPKLLIYKASTLASGVPSRFS
GSGSGTEFTLTISSLQPDDFATYYCQQGYSWGNVDNVFGGGTKVEIKGGGGSGGGGSGRSLVESGGGLVQPGGSLRL
SCTASGFTISSYHMQWVRQAPGKGLEYIGTISSGGNVYYASSARGRFTISRPSSKNTVDLQMNSLRAEDTAVYYCAR
DSGYSDPMWGQGTLVTVSSGGGGSGGGGSGGGGSGGGGSDVVMTQSPSSVSASVGDRVTITCQASQNIRTYLSWYQQ
KPGKAPKLLIYAAANLASGVPSRFSGSGSGTDFTLTISDLEPGDAATYYCQSTYLGTDYVGGAFGGGTKVEIK
>SEQ ID 135 SI-53E1 and SI-53E3 chain B nt
GACATTGTGATGACACAGTCTCCATCCTCCCTGACTGTGACAGCAGGAGAGAAGGTCACTATGAGCTGCAAGTCCAG
TCAGAGTCTGTTAAACAGTGGAAATCAAAAGAACTACTTGACCTGGTACCAGCAGAAACCAGGGCAGCCTCCTAAAC
TGTTGATCTACTGGGCATCCACTAGGGAATCTGGGGTCCCTGATCGCTTCACAGGCAGTGGATCTGGAACAGATTTC
ACTCTCACCATCAGCAGTGTGCAGGCTGAAGACCTGGCAGTTTATTACTGTCAGAATGATTATAGTTATCCATTCAC
GTTCGGCTCGGGGACAAAGTTGGAAATAAAACGTACGGTGGCTGCACCATCTGTCTTCATCTTCCCGCCATCTGATG
AGCAGTTGAAATCTGGAACTGCCTCTGTTGTGTGCCTGCTGAATAACTTCTATCCCAGAGAGGCCAAAGTACAGTGG
AAGGTGGATAACGCCCTCCAATCGGGTAACTCCCAGGAGAGTGTCACAGAGCAGGACAGCAAGGACAGCACCTACAG
CCTCAGCAGCACCCTGACGCTGAGCAAAGCAGACTACGAGAAACACAAAGTCTACGCCTGCGAAGTCACCCATCAGG
GCCTGAGCTCGCCCGTCACAAAGAGCTTCAACAGGGGAGAGTGTTAG
>SEQ ID 136 SI-53E1 and SI-53E3 chain B aa
DIVMTQSPSSLTVTAGEKVTMSCKSSQSLLNSGNQKNYLTWYQQKPGQPPKLLIYWASTRESGVPDRFTGSGSGTDF
TLTISSVQAEDLAVYYCQNDYSYPFTFGSGTKLEIKRTVAAPSVFIFPPSDEQLKSGTASVVCLLNNFYPREAKVQW
KVDNALQSGNSQESVTEQDSKDSTYSLSSTLTLSKADYEKHKVYACEVTHQGLSSPVTKSFNRGEC
>SEQ ID 137 SI-53E3 chain A nt
GACGTCGTGATGACCCAGTCTCCTTCCACCCTGTCTGCATCTGTAGGAGACAGAGTCACCATCAATTGCCAAGCCAG
TGAGAGCATTAGCAGTTGGTTAGCCTGGTATCAGCAGAAACCAGGGAAAGCCCCTAAGCTCCTGATCTATGAAGCAT
CCAAACTGGCATCTGGGGTCCCATCAAGGTTCAGCGGCAGTGGATCTGGGACAGAATTTACTCTCACCATCAGCAGC
CTGCAGCCTGATGATTTTGCAACTTATTACTGCCAAGGCTATTTTTATTTTATTAGTCGTACTTATGTAAATTCTTT
CGGCTGTGGGACCAAGGTGGAGATCAAAGGTGGAGGCGGTTCAGGCGGAGGTGGAAGTGGTGGTGGCGGCTCTGGAG
GCGGCGGATCTGAGGTGCAGCTGGTGGAGTCTGGGGGAGGCTTGGTCCAGCCTGGGGGGTCCCTGAGACTCTCCTGT
GCAGCCTCTGGATTCACCATCAGTACCAATGCAATGAGCTGGGTCCGCCAGGCTCCAGGGAAGTGCCTGGAGTGGAT
CGGAGTCATTACTGGTCGTGATATCACATACTACGCGAGCTGGGCGAAAGGCAGATTCACCATCTCCAGAGACAATT
CCAAGAACACGCTGTATCTTCAAATGAACAGCCTGAGAGCCGAGGACACGGCTGTGTATTACTGTGCGAGAGACGGT
GGTTCTTCTGCTATTACTAGTAACAACATTTGGGGCCAGGGAACCCTGGTCACCGTGTCGACAGGCGGTGGAGGGTC
CGGCGGTGGTGGATCACAGGTCCAACTGCAGCAGCCTGGGGCTGAGCTGGTGAGGCCTGGGGCTTCAGTGAAGCTGT
CCTGCAAGGCTTCTGGCTACACCTTCACCAGCTACTGGATAAACTGGGTGAAGCAGAGGCCTGGACAAGGCCTTGAG
TGGATCGGAAATATTTATCCTTCTGATAGTTATACTAACTACAATCAAAAGTTCAAGGACAAGGCCACATTGACTGT
AGACAAATCCTCCAGCACAGCCTACATGCAGCTCAGCAGCCCGACATCTGAGGACTCTGCGGTCTATTACTGTACAA
GATCGTGGAGGGGTAACTCCTTTGACTACTGGGGCCAAGGCACCACTCTCACAGTCTCCTCAGCTAGCACCAAGGGC
CCATCGGTCTTCCCCCTGGCACCCTCCTCCAAGAGCACCTCTGGGGGCACAGCGGCCCTGGGCTGCCTGGTCAAGGA
CTACTTCCCCGAACCGGTGACGGTGTCGTGGAACTCAGGCGCCCTGACCAGCGGCGTGCACACCTTCCCGGCTGTCC
TACAGTCCTCAGGACTCTACTCCCTCAGCAGCGTGGTGACCGTGCCCTCCAGCAGCTTGGGCACCCAGACCTACATC
TGCAACGTGAATCACAAGCCCAGCAACACCAAGGTGGACAAGAGAGTTGAGCCCAAATCTTGTGACAAAACTCACAC
ATGCCCACCGTGCCCAGCACCTGAAGCCGCGGGGGGACCGTCAGTCTTCCTCTTCCCCCCAAAACCCAAGGACACCC
TCATGATCTCCCGGACCCCTGAGGTCACATGCGTGGTGGTGGACGTGAGCCACGAAGACCCTGAGGTCAAGTTCAAC
TGGTACGTGGACGGCGTGGAGGTGCATAATGCCAAGACAAAGCCGCGGGAGGAGCAGTACGCCAGCACGTACCGTGT
GGTCAGCGTCCTCACCGTCCTGCACCAGGACTGGCTGAATGGCAAGGAGTACAAGTGCGCGGTCTCCAACAAAGCCC
TCCCAGCCCCCATCGAGAAAACCATCTCCAAAGCCAAAGGGCAGCCCCGAGAACCACAGGTGTACACCCTGCCCCCA
TCCCGGGATGAGCTGACCAAGAACCAGGTCAGCCTGACCTGCCTGGTCAAAGGCTTCTATCCCAGCGACATCGCCGT
GGAGTGGGAGAGCAATGGGCAGCCGGAGAACAACTACAAGACCACGCCTCCCGTGCTGGACTCCGACGGCTCCTTCT
TCCTCTATAGCAAGCTCACCGTGGACAAGAGCAGGTGGCAGCAGGGGAACGTCTTCTCATGCTCCGTGATGCATGAG
GCTCTGCACAACCACTACACGCAGAAGAGCCTCTCCCTGTCTCCGGGTGGCGGTGGAGGGTCCGGCGGTGGTGGATC
CGAGGTGCAGCTGTTGGAGTCTGGGGGAGGCTTGGTACAGCCTGGGGGGTCCCTGAGACTCTCCTGTGCAGCCTCTG
GATTCTCCTTCAGTAGCGGGTACGACATGTGCTGGGTCCGCCAGGCTCCAGGGAAGTGCCTGGAGTGGATCGCATGC
ATTGCTGCTGGTAGTGCTGGTATCACTTACGACGCGAACTGGGCGAAAGGCCGGTTCACCATCTCCAGAGACAATTC
CAAGAACACGCTGTATCTGCAAATGAACAGCCTGAGAGCCGAGGACACGGCCGTATATTACTGTGCGAGATCGGCGT
TTTCGTTCGACTACGCCATGGACCTCTGGGGCCAGGGAACCCTGGTCACCGTCTCGAGCGGTGGAGGCGGTTCAGGC
GGAGGTGGAAGTGGTGGTGGCGGCTCTGGAGGCGGCGGATCTGACATCCAGATGACCCAGTCTCCTTCCACCCTGTC
TGCATCTGTAGGAGACAGAGTCACCATCACTTGCCAGGCCAGTCAGAGCATTAGTTCCCACTTAAACTGGTATCAGC
AGAAACCAGGGAAAGCCCCTAAGCTCCTGATCTATAAGGCATCCACTCTGGCATCTGGGGTCCCATCAAGGTTCAGC
GGCAGTGGATCTGGGACAGAATTTACTCTCACCATCAGCAGCCTGCAGCCTGATGATTTTGCAACTTATTACTGCCA
ACAGGGTTATAGTTGGGGTAATGTTGATAATGTTTTCGGCTGCGGGACCAAGGTGGAGATCAAAGGTGGTGGCGGCT
CTGGAGGAGGAGGGTCCGGACGGTCGCTGGTGGAGTCTGGGGGAGGCTTGGTCCAGCCTGGGGGGTCCCTGAGACTC
TCCTGTACTGCCTCTGGATTCACCATCAGTAGCTACCACATGCAGTGGGTCCGGCAGGCACCTGGGAAGTGCCTGGA
GTACATCGGAACCATTAGTAGTGGTGGTAATGTATACTACGCAAGCTCCGCTAGAGGCAGATTCACCATCTCCAGAC
CCTCGTCCAAGAACACGGTGGATCTTCAAATGAACAGCCTGAGAGCCGAGGACACGGCTGTGTATTACTGTGCGAGA
GACTCTGGTTATAGTGATCCTATGTGGGGCCAGGGAACCCTGGTCACCGTCTCTTCAGGCGGTGGCGGTAGTGGGGG
AGGCGGTTCTGGCGGCGGAGGGTCCGGCGGTGGAGGATCAGACGTTGTGATGACCCAGTCTCCATCTTCCGTGTCTG
CATCTGTAGGAGACAGAGTCACCATCACCTGTCAGGCCAGTCAGAACATTAGGACTTACTTATCCTGGTATCAGCAG
AAACCAGGGAAAGCCCCTAAGCTCCTGATCTATGCTGCAGCCAATCTGGCATCTGGGGTCCCATCAAGGTTCAGCGG
CAGTGGATCTGGGACAGATTTCACTCTCACCATCAGCGACTTGGAACCTGGCGATGCTGCAACTTACTATTGTCAGT
CTACCTATCTTGGTACTGATTATGTTGGCGGTGCTTTCGGCTGTGGGACCAAGGTGGAGATCAAATGA
>SEQ ID 138 SI-53E3 chain A aa
DVVMTQSPSTLSASVGDRVTINCQASESISSWLAWYQQKPGKAPKLLIYEASKLASGVPSRFSGSGSGTEFTLTISS
LQPDDFATYYCQGYFYFISRTYVNSFGCGTKVEIKGGGGSGGGGSGGGGSGGGGSEVQLVESGGGLVQPGGSLRLSC
AASGFTISTNAMSWVRQAPGKCLEWIGVITGRDITYYASWAKGRFTISRDNSKNTLYLQMNSLRAEDTAVYYCARDG
GSSAITSNNIWGQGTLVTVSTGGGGSGGGGSQVQLQQPGAELVRPGASVKLSCKASGYTFTSYWINWVKQRPGQGLE
WIGNIYPSDSYTNYNQKFKDKATLTVDKSSSTAYMQLSSPTSEDSAVYYCTRSWRGNSFDYWGQGTTLTVSSASTKG
PSVFPLAPSSKSTSGGTAALGCLVKDYFPEPVTVSWNSGALTSGVHTFPAVLQSSGLYSLSSVVTVPSSSLGTQTYI
CNVNHKPSNTKVDKRVEPKSCDKTHTCPPCPAPEAAGGPSVFLFPPKPKDTLMISRTPEVTCVVVDVSHEDPEVKFN
WYVDGVEVHNAKTKPREEQYASTYRVVSVLTVLHQDWLNGKEYKCAVSNKALPAPIEKTISKAKGQPREPQVYTLPP
SRDELTKNQVSLTCLVKGFYPSDIAVEWESNGQPENNYKTTPPVLDSDGSFFLYSKLTVDKSRWQQGNVFSCSVMHE
ALHNHYTQKSLSLSPGGGGGSGGGGSEVQLLESGGGLVQPGGSLRLSCAASGFSFSSGYDMCWVRQAPGKCLEWIAC
IAAGSAGITYDANWAKGRFTISRDNSKNTLYLQMNSLRAEDTAVYYCARSAFSFDYAMDLWGQGTLVTVSSGGGGSG
GGGSGGGGSGGGGSDIQMTQSPSTLSASVGDRVTITCQASQSISSHLNWYQQKPGKAPKLLIYKASTLASGVPSRFS
GSGSGTEFTLTISSLQPDDFATYYCQQGYSWGNVDNVFGCGTKVEIKGGGGSGGGGSGRSLVESGGGLVQPGGSLRL
SCTASGFTISSYHMQWVRQAPGKCLEYIGTISSGGNVYYASSARGRFTISRPSSKNTVDLQMNSLRAEDTAVYYCAR
DSGYSDPMWGQGTLVTVSSGGGGSGGGGSGGGGSGGGGSDVVMTQSPSSVSASVGDRVTITCQASQNIRTYLSWYQQ
KPGKAPKLLIYAAANLASGVPSRFSGSGSGTDFTLTISDLEPGDAATYYCQSTYLGTDYVGGAFGCGTKVEIK
>SEQ ID 139 SI-54E1 chain A nt
GACGTCGTGATGACCCAGTCTCCTTCCACCCTGTCTGCATCTGTAGGAGACAGAGTCACCATCAATTGCCAAGCCAG
TGAGAGCATTAGCAGTTGGTTAGCCTGGTATCAGCAGAAACCAGGGAAAGCCCCTAAGCTCCTGATCTATGAAGCAT
CCAAACTGGCATCTGGGGTCCCATCAAGGTTCAGCGGCAGTGGATCTGGGACAGAATTTACTCTCACCATCAGCAGC
CTGCAGCCTGATGATTTTGCAACTTATTACTGCCAAGGCTATTTTTATTTTATTAGTCGTACTTATGTAAATTCTTT
CGGCGGAGGGACCAAGGTGGAGATCAAAGGCGGTGGCGGTAGTGGGGGAGGCGGTTCTGGCGGCGGAGGGTCCGGCG
GTGGAGGATCAGAGGTGCAGCTGGTGGAGTCTGGGGGAGGCTTGGTCCAGCCTGGGGGGTCCCTGAGACTCTCCTGT
GCAGCCTCTGGATTCACCATCAGTACCAATGCAATGAGCTGGGTCCGCCAGGCTCCAGGGAAGGGGCTGGAGTGGAT
CGGAGTCATTACTGGTCGTGATATCACATACTACGCGAGCTGGGCGAAAGGCAGATTCACCATCTCCAGAGACAATT
CCAAGAACACGCTGTATCTTCAAATGAACAGCCTGAGAGCCGAGGACACGGCTGTGTATTACTGTGCGAGAGACGGT
GGTTCTTCTGCTATTACTAGTAACAACATTTGGGGCCAGGGAACCCTGGTCACCGTGTCGACAGGCGGTGGAGGGTC
CGGCGGTGGTGGATCACAGGTGCAGCTGCAGCAGCCCGGCGCCGAGCTGGTGAAGCCCGGCGCCAGCGTGAAGATGA
GCTGCAAGGCCAGCGGCTACACCTTCACCAGCTACAACATGCACTGGGTGAAGCAGACCCCCGGCCGGGGCCTGGAG
TGGATCGGCGCCATCTACCCCGGCAACGGCGACACCAGCTACAACCAGAAGTTCAAGGGCAAGGCCACCCTGACCGC
CGACAAGAGCAGCAGCACCGCCTACATGCAGCTGAGCAGCCTGACCAGCGAGGACAGCGCCGTGTACTACTGCGCCC
GGAGCACCTACTACGGCGGCGACTGGTACTTCAACGTGTGGGGCGCCGGCACCACCGTGACCGTGAGCGCCGCTAGC
ACCAAGGGCCCATCGGTCTTCCCCCTGGCACCCTCCTCCAAGAGCACCTCTGGGGGCACAGCGGCCCTGGGCTGCCT
GGTCAAGGACTACTTCCCCGAACCGGTGACGGTGTCGTGGAACTCAGGCGCCCTGACCAGCGGCGTGCACACCTTCC
CGGCTGTCCTACAGTCCTCAGGACTCTACTCCCTCAGCAGCGTGGTGACCGTGCCCTCCAGCAGCTTGGGCACCCAG
ACCTACATCTGCAACGTGAATCACAAGCCCAGCAACACCAAGGTGGACAAGAGAGTTGAGCCCAAATCTTGTGACAA
AACTCACACATGCCCACCGTGCCCAGCACCTGAAGCCGCGGGGGCACCGTCAGTCTTCCTCTTCCCCCCAAAACCCA
AGGACACCCTCATGATCTCCCGGACCCCTGAGGTCACATGCGTGGTGGTGGACGTGAGCCACGAAGACCCTGAGGTC
AAGTTCAACTGGTACGTGGACGGCGTGGAGGTGCATAATGCCAAGACAAAGCCGCGGGAGGAGCAGTACAACAGCAC
GTACCGTGTGGTCAGCGTCCTCACCGTCCTGCACCAGGACTGGCTGAATGGCAAGGAGTACAAGTGCGCGGTCTCCA
ACAAAGCCCTCCCAGCCCCCATCGAGAAAACCATCTCCAAAGCCAAAGGGCAGCCCCGAGAACCACAGGTGTACACC
CTGCCCCCATCCCGGGATGAGCTGACCAAGAACCAGGTCAGCCTGACCTGCCTGGTCAAAGGCTTCTATCCCAGCGA
CATCGCCGTGGAGTGGGAGAGCAATGGGCAGCCGGAGAACAACTACAAGACCACGCCTCCCGTGCTGGACTCCGACG
GCTCCTTCTTCCTCTATAGCAAGCTCACCGTGGACAAGAGCAGGTGGCAGCAGGGGAACGTCTTCTCATGCTCCGTG
ATGCATGAGGCTCTGCACAACCACTACACGCAGAAGAGCCTCTCCCTGTCTCCGGGTGGCGGTGGAGGGTCCGGCGG
TGGTGGATCCGAGGTGCAGCTGTTGGAGTCTGGGGGAGGCTTGGTACAGCCTGGGGGGTCCCTGAGACTCTCCTGTG
CAGCCTCTGGATTCTCCTTCAGTAGCGGGTACGACATGTGCTGGGTCCGCCAGGCTCCAGGGAAGGGGCTGGAGTGG
ATCGCATGCATTGCTGCTGGTAGTGCTGGTATCACTTACGACGCGAACTGGGCGAAAGGCCGGTTCACCATCTCCAG
AGACAATTCCAAGAACACGCTGTATCTGCAAATGAACAGCCTGAGAGCCGAGGACACGGCCGTATATTACTGTGCGA
GATCGGCGTTTTCGTTCGACTACGCCATGGACCTCTGGGGCCAGGGAACCCTGGTCACCGTCTCGAGCGGTGGAGGC
GGATCTGGCGGAGGTGGTTCCGGCGGTGGCGGCTCCGGTGGAGGCGGCTCTGACATCCAGATGACCCAGTCTCCTTC
CACCCTGTCTGCATCTGTAGGAGACAGAGTCACCATCACTTGCCAGGCCAGTCAGAGCATTAGTTCCCACTTAAACT
GGTATCAGCAGAAACCAGGGAAAGCCCCTAAGCTCCTGATCTATAAGGCATCCACTCTGGCATCTGGGGTCCCATCA
AGGTTCAGCGGCAGTGGATCTGGGACAGAATTTACTCTCACCATCAGCAGCCTGCAGCCTGATGATTTTGCAACTTA
TTACTGCCAACAGGGTTATAGTTGGGGTAATGTTGATAATGTTTTCGGCGGAGGGACCAAGGTGGAGATCAAAGGCG
GTGGAGGGTCCGGCGGTGGTGGCTCCGGACGGTCGCTGGTGGAGTCTGGGGGAGGCTTGGTCCAGCCTGGGGGGTCC
CTGAGACTCTCCTGTACTGCCTCTGGATTCACCATCAGTAGCTACCACATGCAGTGGGTCCGCCAGGCTCCAGGGAA
GGGGCTGGAGTACATCGGAACCATTAGTAGTGGTGGTAATGTATACTACGCAAGCTCCGCTAGAGGCAGATTCACCA
TCTCCAGACCCTCGTCCAAGAACACGGTGGATCTTCAAATGAACAGCCTGAGAGCCGAGGACACGGCTGTGTATTAC
TGTGCGAGAGACTCTGGTTATAGTGATCCTATGTGGGGCCAGGGAACCCTGGTCACCGTCTCTTCAGGCGGTGGCGG
TAGTGGGGGAGGCGGTTCTGGCGGCGGAGGGTCCGGCGGTGGAGGATCAGACGTTGTGATGACCCAGTCTCCATCTT
CCGTGTCTGCATCTGTAGGAGACAGAGTCACCATCACCTGTCAGGCCAGTCAGAACATTAGGACTTACTTATCCTGG
TATCAGCAGAAACCAGGGAAAGCCCCTAAGCTCCTGATCTATGCTGCAGCCAATCTGGCATCTGGGGTCCCATCAAG
GTTCAGCGGCAGTGGATCTGGGACAGATTTCACTCTCACCATCAGCGACCTGGAGCCTGGCGATGCTGCAACTTACT
ATTGTCAGTCTACCTATCTTGGTACTGATTATGTTGGCGGTGCTTTCGGCGGAGGGACCAAGGTGGAGATCAAATGA
>SEQ ID 140 SI-54E1 chain A aa
DVVMTQSPSTLSASVGDRVTINCQASESISSWLAWYQQKPGKAPKLLIYEASKLASGVPSRFSGSGSGTEFTLTISS
LQPDDFATYYCQGYFYFISRTYVNSFGGGTKVEIKGGGGSGGGGSGGGGSGGGGSEVQLVESGGGLVQPGGSLRLSC
AASGFTISTNAMSWVRQAPGKGLEWIGVITGRDITYYASWAKGRFTISRDNSKNTLYLQMNSLRAEDTAVYYCARDG
GSSAITSNNIWGQGTLVTVSTGGGGSGGGGSQVQLQQPGAELVKPGASVKMSCKASGYTFTSYNMHWVKQTPGRGLE
WIGAIYPGNGDTSYNQKFKGKATLTADKSSSTAYMQLSSLTSEDSAVYYCARSTYYGGDWYFNVWGAGTTVTVSAAS
TKGPSVFPLAPSSKSTSGGTAALGCLVKDYFPEPVTVSWNSGALTSGVHTFPAVLQSSGLYSLSSVVTVPSSSLGTQ
TYICNVNHKPSNTKVDKRVEPKSCDKTHTCPPCPAPEAAGAPSVFLFPPKPKDTLMISRTPEVTCVVVDVSHEDPEV
KFNWYVDGVEVHNAKTKPREEQYNSTYRVVSVLTVLHQDWLNGKEYKCAVSNKALPAPIEKTISKAKGQPREPQVYT
LPPSRDELTKNQVSLTCLVKGFYPSDIAVEWESNGQPENNYKTTPPVLDSDGSFFLYSKLTVDKSRWQQGNVFSCSV
MHEALHNHYTQKSLSLSPGGGGGSGGGGSEVQLLESGGGLVQPGGSLRLSCAASGFSFSSGYDMCWVRQAPGKGLEW
IACIAAGSAGITYDANWAKGRFTISRDNSKNTLYLQMNSLRAEDTAVYYCARSAFSFDYAMDLWGQGTLVTVSSGGG
GSGGGGSGGGGSGGGGSDIQMTQSPSTLSASVGDRVTITCQASQSISSHLNWYQQKPGKAPKLLIYKASTLASGVPS
RFSGSGSGTEFTLTISSLQPDDFATYYCQQGYSWGNVDNVFGGGTKVEIKGGGGSGGGGSGRSLVESGGGLVQPGGS
LRLSCTASGFTISSYHMQWVRQAPGKGLEYIGTISSGGNVYYASSARGRFTISRPSSKNTVDLQMNSLRAEDTAVYY
CARDSGYSDPMWGQGTLVTVSSGGGGSGGGGSGGGGSGGGGSDVVMTQSPSSVSASVGDRVTITCQASQNIRTYLSW
YQQKPGKAPKLLIYAAANLASGVPSRFSGSGSGTDFTLTISDLEPGDAATYYCQSTYLGTDYVGGAFGGGTKVEIK
>SEQ ID 141 SI-54E1 and SI-54E3 chain B nt
CAGATCGTGCTGAGCCAGAGCCCCGCCATCCTGAGCGCCAGCCCCGGCGAGAAGGTGACCATGACCTGCCGGGCCAG
CAGCAGCGTGAGCTACATCCACTGGTTCCAGCAGAAGCCCGGCAGCAGCCCCAAGCCCTGGATCTACGCCACCAGCA
ACCTGGCCAGCGGCGTGCCCGTGCGGTTCAGCGGCAGCGGCAGCGGCACCAGCTACAGCCTGACCATCAGCCGGGTG
GAGGCCGAGGACGCCGCCACCTACTACTGCCAGCAGTGGACCAGCAACCCCCCCACCTTCGGCGGCGGCACCAAGCT
GGAGATCAAGCGTACGGTGGCTGCACCATCTGTCTTCATCTTCCCGCCATCTGATGAGCAGTTGAAATCTGGAACTG
CCTCTGTTGTGTGCCTGCTGAATAACTTCTATCCCAGAGAGGCCAAAGTACAGTGGAAGGTGGATAACGCCCTCCAA
TCGGGTAACTCCCAGGAGAGTGTCACAGAGCAGGACAGCAAGGACAGCACCTACAGCCTCAGCAGCACCCTGACGCT
GAGCAAAGCAGACTACGAGAAACACAAAGTCTACGCCTGCGAAGTCACCCATCAGGGCCTGAGCTCGCCCGTCACAA
AGAGCTTCAACAGGGGAGAGTGTTAG
>SEQ ID 142 SI-54E1 and SI-54E3 chain B aa
QIVLSQSPAILSASPGEKVTMTCRASSSVSYIHWFQQKPGSSPKPWIYATSNLASGVPVRFSGSGSGTSYSLTISRV
EAEDAATYYCQQWTSNPPTFGGGTKLEIKRTVAAPSVFIFPPSDEQLKSGTASVVCLLNNFYPREAKVQWKVDNALQ
SGNSQESVTEQDSKDSTYSLSSTLTLSKADYEKHKVYACEVTHQGLSSPVTKSFNRGEC
>SEQ ID 143 SI-54E3 chain A nt
GACGTCGTGATGACCCAGTCTCCTTCCACCCTGTCTGCATCTGTAGGAGACAGAGTCACCATCAATTGCCAAGCCAG
TGAGAGCATTAGCAGTTGGTTAGCCTGGTATCAGCAGAAACCAGGGAAAGCCCCTAAGCTCCTGATCTATGAAGCAT
CCAAACTGGCATCTGGGGTCCCATCAAGGTTCAGCGGCAGTGGATCTGGGACAGAATTTACTCTCACCATCAGCAGC
CTGCAGCCTGATGATTTTGCAACTTATTACTGCCAAGGCTATTTTTATTTTATTAGTCGTACTTATGTAAATTCTTT
CGGCTGTGGGACCAAGGTGGAGATCAAAGGTGGAGGCGGTTCAGGCGGAGGTGGAAGTGGTGGTGGCGGCTCTGGAG
GCGGCGGATCTGAGGTGCAGCTGGTGGAGTCTGGGGGAGGCTTGGTCCAGCCTGGGGGGTCCCTGAGACTCTCCTGT
GCAGCCTCTGGATTCACCATCAGTACCAATGCAATGAGCTGGGTCCGCCAGGCTCCAGGGAAGTGCCTGGAGTGGAT
CGGAGTCATTACTGGTCGTGATATCACATACTACGCGAGCTGGGCGAAAGGCAGATTCACCATCTCCAGAGACAATT
CCAAGAACACGCTGTATCTTCAAATGAACAGCCTGAGAGCCGAGGACACGGCTGTGTATTACTGTGCGAGAGACGGT
GGTTCTTCTGCTATTACTAGTAACAACATTTGGGGCCAGGGAACCCTGGTCACCGTGTCGACAGGCGGTGGAGGGTC
CGGCGGTGGTGGATCACAGGTGCAGCTGCAGCAGCCCGGCGCCGAGCTGGTGAAGCCCGGCGCCAGCGTGAAGATGA
GCTGCAAGGCCAGCGGCTACACCTTCACCAGCTACAACATGCACTGGGTGAAGCAGACCCCCGGCCGGGGCCTGGAG
TGGATCGGCGCCATCTACCCCGGCAACGGCGACACCAGCTACAACCAGAAGTTCAAGGGCAAGGCCACCCTGACCGC
CGACAAGAGCAGCAGCACCGCCTACATGCAGCTGAGCAGCCTGACCAGCGAGGACAGCGCCGTGTACTACTGCGCCC
GGAGCACCTACTACGGCGGCGACTGGTACTTCAACGTGTGGGGCGCCGGCACCACCGTGACCGTGAGCGCCGCTAGC
ACCAAGGGCCCATCGGTCTTCCCCCTGGCACCCTCCTCCAAGAGCACCTCTGGGGGCACAGCGGCCCTGGGCTGCCT
GGTCAAGGACTACTTCCCCGAACCGGTGACGGTGTCGTGGAACTCAGGCGCCCTGACCAGCGGCGTGCACACCTTCC
CGGCTGTCCTACAGTCCTCAGGACTCTACTCCCTCAGCAGCGTGGTGACCGTGCCCTCCAGCAGCTTGGGCACCCAG
ACCTACATCTGCAACGTGAATCACAAGCCCAGCAACACCAAGGTGGACAAGAGAGTTGAGCCCAAATCTTGTGACAA
AACTCACACATGCCCACCGTGCCCAGCACCTGAAGCCGCGGGGGGACCGTCAGTCTTCCTCTTCCCCCCAAAACCCA
AGGACACCCTCATGATCTCCCGGACCCCTGAGGTCACATGCGTGGTGGTGGACGTGAGCCACGAAGACCCTGAGGTC
AAGTTCAACTGGTACGTGGACGGCGTGGAGGTGCATAATGCCAAGACAAAGCCGCGGGAGGAGCAGTACGCCAGCAC
GTACCGTGTGGTCAGCGTCCTCACCGTCCTGCACCAGGACTGGCTGAATGGCAAGGAGTACAAGTGCGCGGTCTCCA
ACAAAGCCCTCCCAGCCCCCATCGAGAAAACCATCTCCAAAGCCAAAGGGCAGCCCCGAGAACCACAGGTGTACACC
CTGCCCCCATCCCGGGATGAGCTGACCAAGAACCAGGTCAGCCTGACCTGCCTGGTCAAAGGCTTCTATCCCAGCGA
CATCGCCGTGGAGTGGGAGAGCAATGGGCAGCCGGAGAACAACTACAAGACCACGCCTCCCGTGCTGGACTCCGACG
GCTCCTTCTTCCTCTATAGCAAGCTCACCGTGGACAAGAGCAGGTGGCAGCAGGGGAACGTCTTCTCATGCTCCGTG
ATGCATGAGGCTCTGCACAACCACTACACGCAGAAGAGCCTCTCCCTGTCTCCGGGTGGCGGTGGAGGGTCCGGCGG
TGGTGGATCCGAGGTGCAGCTGTTGGAGTCTGGGGGAGGCTTGGTACAGCCTGGGGGGTCCCTGAGACTCTCCTGTG
CAGCCTCTGGATTCTCCTTCAGTAGCGGGTACGACATGTGCTGGGTCCGCCAGGCTCCAGGGAAGTGCCTGGAGTGG
ATCGCATGCATTGCTGCTGGTAGTGCTGGTATCACTTACGACGCGAACTGGGCGAAAGGCCGGTTCACCATCTCCAG
AGACAATTCCAAGAACACGCTGTATCTGCAAATGAACAGCCTGAGAGCCGAGGACACGGCCGTATATTACTGTGCGA
GATCGGCGTTTTCGTTCGACTACGCCATGGACCTCTGGGGCCAGGGAACCCTGGTCACCGTCTCGAGCGGTGGAGGC
GGTTCAGGCGGAGGTGGAAGTGGTGGTGGCGGCTCTGGAGGCGGCGGATCTGACATCCAGATGACCCAGTCTCCTTC
CACCCTGTCTGCATCTGTAGGAGACAGAGTCACCATCACTTGCCAGGCCAGTCAGAGCATTAGTTCCCACTTAAACT
GGTATCAGCAGAAACCAGGGAAAGCCCCTAAGCTCCTGATCTATAAGGCATCCACTCTGGCATCTGGGGTCCCATCA
AGGTTCAGCGGCAGTGGATCTGGGACAGAATTTACTCTCACCATCAGCAGCCTGCAGCCTGATGATTTTGCAACTTA
TTACTGCCAACAGGGTTATAGTTGGGGTAATGTTGATAATGTTTTCGGCTGCGGGACCAAGGTGGAGATCAAAGGTG
GTGGCGGCTCTGGAGGAGGAGGGTCCGGACGGTCGCTGGTGGAGTCTGGGGGAGGCTTGGTCCAGCCTGGGGGGTCC
CTGAGACTCTCCTGTACTGCCTCTGGATTCACCATCAGTAGCTACCACATGCAGTGGGTCCGGCAGGCACCTGGGAA
GTGCCTGGAGTACATCGGAACCATTAGTAGTGGTGGTAATGTATACTACGCAAGCTCCGCTAGAGGCAGATTCACCA
TCTCCAGACCCTCGTCCAAGAACACGGTGGATCTTCAAATGAACAGCCTGAGAGCCGAGGACACGGCTGTGTATTAC
TGTGCGAGAGACTCTGGTTATAGTGATCCTATGTGGGGCCAGGGAACCCTGGTCACCGTCTCTTCAGGCGGTGGCGG
TAGTGGGGGAGGCGGTTCTGGCGGCGGAGGGTCCGGCGGTGGAGGATCAGACGTTGTGATGACCCAGTCTCCATCTT
CCGTGTCTGCATCTGTAGGAGACAGAGTCACCATCACCTGTCAGGCCAGTCAGAACATTAGGACTTACTTATCCTGG
TATCAGCAGAAACCAGGGAAAGCCCCTAAGCTCCTGATCTATGCTGCAGCCAATCTGGCATCTGGGGTCCCATCAAG
GTTCAGCGGCAGTGGATCTGGGACAGATTTCACTCTCACCATCAGCGACTTGGAACCTGGCGATGCTGCAACTTACT
ATTGTCAGTCTACCTATCTTGGTACTGATTATGTTGGCGGTGCTTTCGGCTGTGGGACCAAGGTGGAGATCAAATGA
>SEQ ID 144 SI-54E3 chain A aa
DVVMTQSPSTLSASVGDRVTINCQASESISSWLAWYQQKPGKAPKLLIYEASKLASGVPSRFSGSGSGTEFTLTISS
LQPDDFATYYCQGYFYFISRTYVNSFGCGTKVEIKGGGGSGGGGSGGGGSGGGGSEVQLVESGGGLVQPGGSLRLSC
AASGFTISTNAMSWVRQAPGKCLEWIGVITGRDITYYASWAKGRFTISRDNSKNTLYLQMNSLRAEDTAVYYCARDG
GSSAITSNNIWGQGTLVTVSTGGGGSGGGGSQVQLQQPGAELVKPGASVKMSCKASGYTFTSYNMHWVKQTPGRGLE
WIGAIYPGNGDTSYNQKFKGKATLTADKSSSTAYMQLSSLTSEDSAVYYCARSTYYGGDWYFNVWGAGTTVTVSAAS
TKGPSVFPLAPSSKSTSGGTAALGCLVKDYFPEPVTVSWNSGALTSGVHTFPAVLQSSGLYSLSSVVTVPSSSLGTQ
TYICNVNHKPSNTKVDKRVEPKSCDKTHTCPPCPAPEAAGGPSVFLFPPKPKDTLMISRTPEVTCVVVDVSHEDPEV
KFNWYVDGVEVHNAKTKPREEQYASTYRVVSVLTVLHQDWLNGKEYKCAVSNKALPAPIEKTISKAKGQPREPQVYT
LPPSRDELTKNQVSLTCLVKGFYPSDIAVEWESNGQPENNYKTTPPVLDSDGSFFLYSKLTVDKSRWQQGNVFSCSV
MHEALHNHYTQKSLSLSPGGGGGSGGGGSEVQLLESGGGLVQPGGSLRLSCAASGFSFSSGYDMCWVRQAPGKCLEW
IACIAAGSAGITYDANWAKGRFTISRDNSKNTLYLQMNSLRAEDTAVYYCARSAFSFDYAMDLWGQGTLVTVSSGGG
GSGGGGSGGGGSGGGGSDIQMTQSPSTLSASVGDRVTITCQASQSISSHLNWYQQKPGKAPKLLIYKASTLASGVPS
RFSGSGSGTEFTLTISSLQPDDFATYYCQQGYSWGNVDNVFGCGTKVEIKGGGGSGGGGSGRSLVESGGGLVQPGGS
LRLSCTASGFTISSYHMQWVRQAPGKCLEYIGTISSGGNVYYASSARGRFTISRPSSKNTVDLQMNSLRAEDTAVYY
CARDSGYSDPMWGQGTLVTVSSGGGGSGGGGSGGGGSGGGGSDVVMTQSPSSVSASVGDRVTITCQASQNIRTYLSW
YQQKPGKAPKLLIYAAANLASGVPSRFSGSGSGTDFTLTISDLEPGDAATYYCQSTYLGTDYVGGAFGCGTKVEIK
>SEQ ID 145 SI-55E1 chain A nt
GACGTCGTGATGACCCAGTCTCCTTCCACCCTGTCTGCATCTGTAGGAGACAGAGTCACCATCAATTGCCAAGCCAG
TGAGAGCATTAGCAGTTGGTTAGCCTGGTATCAGCAGAAACCAGGGAAAGCCCCTAAGCTCCTGATCTATGAAGCAT
CCAAACTGGCATCTGGGGTCCCATCAAGGTTCAGCGGCAGTGGATCTGGGACAGAATTTACTCTCACCATCAGCAGC
CTGCAGCCTGATGATTTTGCAACTTATTACTGCCAAGGCTATTTTTATTTTATTAGTCGTACTTATGTAAATTCTTT
CGGCGGAGGGACCAAGGTGGAGATCAAAGGCGGTGGCGGTAGTGGGGGAGGCGGTTCTGGCGGCGGAGGGTCCGGCG
GTGGAGGATCAGAGGTGCAGCTGGTGGAGTCTGGGGGAGGCTTGGTCCAGCCTGGGGGGTCCCTGAGACTCTCCTGT
GCAGCCTCTGGATTCACCATCAGTACCAATGCAATGAGCTGGGTCCGCCAGGCTCCAGGGAAGGGGCTGGAGTGGAT
CGGAGTCATTACTGGTCGTGATATCACATACTACGCGAGCTGGGCGAAAGGCAGATTCACCATCTCCAGAGACAATT
CCAAGAACACGCTGTATCTTCAAATGAACAGCCTGAGAGCCGAGGACACGGCTGTGTATTACTGTGCGAGAGACGGT
GGTTCTTCTGCTATTACTAGTAACAACATTTGGGGCCAGGGAACCCTGGTCACCGTGTCGACAGGCGGTGGAGGGTC
CGGCGGTGGTGGATCACAGGTGCAGCTGAAGCAGTCAGGACCTGGCCTAGTGCAGCCCTCACAGAGCCTGTCCATCA
CCTGCACAGTCTCTGGTTTCTCATTAACTAACTATGGTGTACACTGGGTTCGCCAGTCTCCAGGAAAGGGTCTGGAG
TGGCTGGGAGTGATATGGAGTGGTGGAAACACAGACTATAATACACCTTTCACATCCAGACTGAGCATCAACAAGGA
CAATTCCAAGAGCCAAGTTTTCTTTAAAATGAACAGTCTGCAATCTAATGACACAGCCATATATTACTGTGCCAGAG
CCCTCACCTACTATGATTACGAGTTTGCTTACTGGGGCCAAGGGACTCTGGTCACTGTCTCTAGCGCTAGCACCAAG
GGCCCATCGGTCTTCCCCCTGGCACCCTCCTCCAAGAGCACCTCTGGGGGCACAGCGGCCCTGGGCTGCCTGGTCAA
GGACTACTTCCCCGAACCGGTGACGGTGTCGTGGAACTCAGGCGCCCTGACCAGCGGCGTGCACACCTTCCCGGCTG
TCCTACAGTCCTCAGGACTCTACTCCCTCAGCAGCGTGGTGACCGTGCCCTCCAGCAGCTTGGGCACCCAGACCTAC
ATCTGCAACGTGAATCACAAGCCCAGCAACACCAAGGTGGACAAGAGAGTTGAGCCCAAATCTTGTGACAAAACTCA
CACATGCCCACCGTGCCCAGCACCTGAAGCCGCGGGGGCACCGTCAGTCTTCCTCTTCCCCCCAAAACCCAAGGACA
CCCTCATGATCTCCCGGACCCCTGAGGTCACATGCGTGGTGGTGGACGTGAGCCACGAAGACCCTGAGGTCAAGTTC
AACTGGTACGTGGACGGCGTGGAGGTGCATAATGCCAAGACAAAGCCGCGGGAGGAGCAGTACAACAGCACGTACCG
TGTGGTCAGCGTCCTCACCGTCCTGCACCAGGACTGGCTGAATGGCAAGGAGTACAAGTGCGCGGTCTCCAACAAAG
CCCTCCCAGCCCCCATCGAGAAAACCATCTCCAAAGCCAAAGGGCAGCCCCGAGAACCACAGGTGTACACCCTGCCC
CCATCCCGGGATGAGCTGACCAAGAACCAGGTCAGCCTGACCTGCCTGGTCAAAGGCTTCTATCCCAGCGACATCGC
CGTGGAGTGGGAGAGCAATGGGCAGCCGGAGAACAACTACAAGACCACGCCTCCCGTGCTGGACTCCGACGGCTCCT
TCTTCCTCTATAGCAAGCTCACCGTGGACAAGAGCAGGTGGCAGCAGGGGAACGTCTTCTCATGCTCCGTGATGCAT
GAGGCTCTGCACAACCACTACACGCAGAAGAGCCTCTCCCTGTCTCCGGGTGGCGGTGGAGGGTCCGGCGGTGGTGG
ATCCGAGGTGCAGCTGTTGGAGTCTGGGGGAGGCTTGGTACAGCCTGGGGGGTCCCTGAGACTCTCCTGTGCAGCCT
CTGGATTCTCCTTCAGTAGCGGGTACGACATGTGCTGGGTCCGCCAGGCTCCAGGGAAGGGGCTGGAGTGGATCGCA
TGCATTGCTGCTGGTAGTGCTGGTATCACTTACGACGCGAACTGGGCGAAAGGCCGGTTCACCATCTCCAGAGACAA
TTCCAAGAACACGCTGTATCTGCAAATGAACAGCCTGAGAGCCGAGGACACGGCCGTATATTACTGTGCGAGATCGG
CGTTTTCGTTCGACTACGCCATGGACCTCTGGGGCCAGGGAACCCTGGTCACCGTCTCGAGCGGTGGAGGCGGATCT
GGCGGAGGTGGTTCCGGCGGTGGCGGCTCCGGTGGAGGCGGCTCTGACATCCAGATGACCCAGTCTCCTTCCACCCT
GTCTGCATCTGTAGGAGACAGAGTCACCATCACTTGCCAGGCCAGTCAGAGCATTAGTTCCCACTTAAACTGGTATC
AGCAGAAACCAGGGAAAGCCCCTAAGCTCCTGATCTATAAGGCATCCACTCTGGCATCTGGGGTCCCATCAAGGTTC
AGCGGCAGTGGATCTGGGACAGAATTTACTCTCACCATCAGCAGCCTGCAGCCTGATGATTTTGCAACTTATTACTG
CCAACAGGGTTATAGTTGGGGTAATGTTGATAATGTTTTCGGCGGAGGGACCAAGGTGGAGATCAAAGGCGGTGGAG
GGTCCGGCGGTGGTGGCTCCGGACGGTCGCTGGTGGAGTCTGGGGGAGGCTTGGTCCAGCCTGGGGGGTCCCTGAGA
CTCTCCTGTACTGCCTCTGGATTCACCATCAGTAGCTACCACATGCAGTGGGTCCGCCAGGCTCCAGGGAAGGGGCT
GGAGTACATCGGAACCATTAGTAGTGGTGGTAATGTATACTACGCAAGCTCCGCTAGAGGCAGATTCACCATCTCCA
GACCCTCGTCCAAGAACACGGTGGATCTTCAAATGAACAGCCTGAGAGCCGAGGACACGGCTGTGTATTACTGTGCG
AGAGACTCTGGTTATAGTGATCCTATGTGGGGCCAGGGAACCCTGGTCACCGTCTCTTCAGGCGGTGGCGGTAGTGG
GGGAGGCGGTTCTGGCGGCGGAGGGTCCGGCGGTGGAGGATCAGACGTTGTGATGACCCAGTCTCCATCTTCCGTGT
CTGCATCTGTAGGAGACAGAGTCACCATCACCTGTCAGGCCAGTCAGAACATTAGGACTTACTTATCCTGGTATCAG
CAGAAACCAGGGAAAGCCCCTAAGCTCCTGATCTATGCTGCAGCCAATCTGGCATCTGGGGTCCCATCAAGGTTCAG
CGGCAGTGGATCTGGGACAGATTTCACTCTCACCATCAGCGACCTGGAGCCTGGCGATGCTGCAACTTACTATTGTC
AGTCTACCTATCTTGGTACTGATTATGTTGGCGGTGCTTTCGGCGGAGGGACCAAGGTGGAGATCAAATGA
>SEQ ID 146 SI-55E1 chain A aa
DVVMTQSPSTLSASVGDRVTINCQASESISSWLAWYQQKPGKAPKLLIYEASKLASGVPSRFSGSGSGTEFTLTISS
LQPDDFATYYCQGYFYFISRTYVNSFGGGTKVEIKGGGGSGGGGSGGGGSGGGGSEVQLVESGGGLVQPGGSLRLSC
AASGFTISTNAMSWVRQAPGKGLEWIGVITGRDITYYASWAKGRFTISRDNSKNTLYLQMNSLRAEDTAVYYCARDG
GSSAITSNNIWGQGTLVTVSTGGGGSGGGGSQVQLKQSGPGLVQPSQSLSITCTVSGFSLTNYGVHWVRQSPGKGLE
WLGVIWSGGNTDYNTPFTSRLSINKDNSKSQVFFKMNSLQSNDTAIYYCARALTYYDYEFAYWGQGTLVTVSSASTK
GPSVFPLAPSSKSTSGGTAALGCLVKDYFPEPVTVSWNSGALTSGVHTFPAVLQSSGLYSLSSVVTVPSSSLGTQTY
ICNVNHKPSNTKVDKRVEPKSCDKTHTCPPCPAPEAAGAPSVFLFPPKPKDTLMISRTPEVTCVVVDVSHEDPEVKF
NWYVDGVEVHNAKTKPREEQYNSTYRVVSVLTVLHQDWLNGKEYKCAVSNKALPAPIEKTISKAKGQPREPQVYTLP
PSRDELTKNQVSLTCLVKGFYPSDIAVEWESNGQPENNYKTTPPVLDSDGSFFLYSKLTVDKSRWQQGNVFSCSVMH
EALHNHYTQKSLSLSPGGGGGSGGGGSEVQLLESGGGLVQPGGSLRLSCAASGFSFSSGYDMCWVRQAPGKGLEWIA
CIAAGSAGITYDANWAKGRFTISRDNSKNTLYLQMNSLRAEDTAVYYCARSAFSFDYAMDLWGQGTLVTVSSGGGGS
GGGGSGGGGSGGGGSDIQMTQSPSTLSASVGDRVTITCQASQSISSHLNWYQQKPGKAPKLLIYKASTLASGVPSRF
SGSGSGTEFTLTISSLQPDDFATYYCQQGYSWGNVDNVFGGGTKVEIKGGGGSGGGGSGRSLVESGGGLVQPGGSLR
LSCTASGFTISSYHMQWVRQAPGKGLEYIGTISSGGNVYYASSARGRFTISRPSSKNTVDLQMNSLRAEDTAVYYCA
RDSGYSDPMWGQGTLVTVSSGGGGSGGGGSGGGGSGGGGSDVVMTQSPSSVSASVGDRVTITCQASQNIRTYLSWYQ
QKPGKAPKLLIYAAANLASGVPSRFSGSGSGTDFTLTISDLEPGDAATYYCQSTYLGTDYVGGAFGGGTKVEIK
>SEQ ID 147 SI-55E1 and SI-55E8 chain B nt
GACATCTTGCTGACTCAGTCTCCAGTCATCCTGTCTGTGAGTCCAGGAGAAAGAGTCAGTTTCTCCTGCAGGGCCAG
TCAGAGTATTGGCACAAACATACACTGGTATCAGCAAAGAACAAATGGTTCTCCAAGGCTTCTCATAAAGTATGCTT
CTGAGTCTATCTCTGGGATTCCTTCCAGGTTTAGTGGCAGTGGATCAGGGACAGATTTTACTCTTAGCATCAACAGT
GTGGAGTCTGAAGATATTGCAGATTATTACTGTCAACAAAATAATAACTGGCCAACCACGTTCGGTGCTGGGACCAA
GCTGGAGCTGAAACGTACGGTGGCTGCACCATCTGTCTTCATCTTCCCGCCATCTGATGAGCAGTTGAAATCTGGAA
CTGCCTCTGTTGTGTGCCTGCTGAATAACTTCTATCCCAGAGAGGCCAAAGTACAGTGGAAGGTGGATAACGCCCTC
CAATCGGGTAACTCCCAGGAGAGTGTCACAGAGCAGGACAGCAAGGACAGCACCTACAGCCTCAGCAGCACCCTGAC
GCTGAGCAAAGCAGACTACGAGAAACACAAAGTCTACGCCTGCGAAGTCACCCATCAGGGCCTGAGCTCGCCCGTCA
CAAAGAGCTTCAACAGGGGAGAGTGTTAG
>SEQ ID 148 SI-55E1 and SI-55E8 chain B aa
DILLTQSPVILSVSPGERVSFSCRASQSIGTNIHWYQQRTNGSPRLLIKYASESISGIPSRFSGSGSGTDFTLSINS
VESEDIADYYCQQNNNWPTTFGAGTKLELKRTVAAPSVFIFPPSDEQLKSGTASVVCLLNNFYPREAKVQWKVDNAL
QSGNSQESVTEQDSKDSTYSLSSTLTLSKADYEKHKVYACEVTHQGLSSPVTKSFNRGEC
>SEQ ID 149 SI-55E8 chain A nt
GACGTCGTGATGACCCAGTCTCCTTCCACCCTGTCTGCATCTGTAGGAGACAGAGTCACCATCAATTGCCAAGCCAG
TGAGAGCATTAGCAGTTGGTTAGCCTGGTATCAGCAGAAACCAGGGAAAGCCCCTAAGCTCCTGATCTATGAAGCAT
CCAAACTGGCATCTGGGGTCCCATCAAGGTTCAGCGGCAGTGGATCTGGGACAGAATTTACTCTCACCATCAGCAGC
CTGCAGCCTGATGATTTTGCAACTTATTACTGCCAAGGCTATTTTTATTTTATTAGTCGTACTTATGTAAATTCTTT
CGGCTGTGGGACCAAGGTGGAGATCAAAGGTGGAGGCGGTTCAGGCGGAGGTGGAAGTGGTGGTGGCGGCTCTGGAG
GCGGCGGATCTGAGGTGCAGCTGGTGGAGTCTGGGGGAGGCTTGGTCCAGCCTGGGGGGTCCCTGAGACTCTCCTGT
GCAGCCTCTGGATTCACCATCAGTACCAATGCAATGAGCTGGGTCCGCCAGGCTCCAGGGAAGTGCCTGGAGTGGAT
CGGAGTCATTACTGGTCGTGATATCACATACTACGCGAGCTGGGCGAAAGGCAGATTCACCATCTCCAGAGACAATT
CCAAGAACACGCTGTATCTTCAAATGAACAGCCTGAGAGCCGAGGACACGGCTGTGTATTACTGTGCGAGAGACGGT
GGTTCTTCTGCTATTACTAGTAACAACATTTGGGGCCAGGGAACCCTGGTCACCGTGTCGACAGGCGGTGGAGGGTC
CGGCGGTGGTGGATCACAGGTGCAGCTGAAGCAGTCAGGACCTGGCCTAGTGCAGCCCTCACAGAGCCTGTCCATCA
CCTGCACAGTCTCTGGTTTCTCATTAACTAACTATGGTGTACACTGGGTTCGCCAGTCTCCAGGAAAGGGTCTGGAG
TGGCTGGGAGTGATATGGAGTGGTGGAAACACAGACTATAATACACCTTTCACATCCAGACTGAGCATCAACAAGGA
CAATTCCAAGAGCCAAGTTTTCTTTAAAATGAACAGTCTGCAATCTAATGACACAGCCATATATTACTGTGCCAGAG
CCCTCACCTACTATGATTACGAGTTTGCTTACTGGGGCCAAGGGACTCTGGTCACTGTCTCTAGCGCTAGCACCAAG
GGCCCATCGGTCTTCCCCCTGGCACCCTCCTCCAAGAGCACCTCTGGGGGCACAGCGGCCCTGGGCTGCCTGGTCAA
GGACTACTTCCCCGAACCGGTGACGGTGTCGTGGAACTCAGGCGCCCTGACCAGCGGCGTGCACACCTTCCCGGCTG
TCCTACAGTCCTCAGGACTCTACTCCCTCAGCAGCGTGGTGACCGTGCCCTCCAGCAGCTTGGGCACCCAGACCTAC
ATCTGCAACGTGAATCACAAGCCCAGCAACACCAAGGTGGACAAGAGAGTTGAGCCCAAATCTTGTGACAAAACTCA
CACATGCCCACCGTGCCCAGCACCTGAAGCCGCGGGGGGACCGTCAGTCTTCCTCTTCCCCCCAAAACCCAAGGACA
CCCTCATGATCTCCCGGACCCCTGAGGTCACATGCGTGGTGGTGGACGTGAGCCACGAAGACCCTGAGGTCAAGTTC
AACTGGTACGTGGACGGCGTGGAGGTGCATAATGCCAAGACAAAGCCGCGGGAGGAGCAGTACGCCAGCACGTACCG
TGTGGTCAGCGTCCTCACCGTCCTGCACCAGGACTGGCTGAATGGCAAGGAGTACAAGTGCGCGGTCTCCAACAAAG
CCCTCCCAGCCCCCATCGAGAAAACCATCTCCAAAGCCAAAGGGCAGCCCCGAGAACCACAGGTGTACACCCTGCCC
CCATCCCGGGATGAGCTGACCAAGAACCAGGTCAGCCTGACCTGCCTGGTCAAAGGCTTCTATCCCAGCGACATCGC
CGTGGAGTGGGAGAGCAATGGGCAGCCGGAGAACAACTACAAGACCACGCCTCCCGTGCTGGACTCCGACGGCTCCT
TCTTCCTCTATAGCAAGCTCACCGTGGACAAGAGCAGGTGGCAGCAGGGGAACGTCTTCTCATGCTCCGTGATGCAT
GAGGCTCTGCACAACCACTACACGCAGAAGAGCCTCTCCCTGTCTCCGGGTGGCGGTGGAGGGTCCGGCGGTGGTGG
ATCCGAGGTGCAGCTGTTGGAGTCTGGGGGAGGCTTGGTACAGCCTGGGGGGTCCCTGAGACTCTCCTGTGCAGCCT
CTGGATTCTCCTTCAGTAGCGGGTACGACATGTGCTGGGTCCGCCAGGCTCCAGGGAAGTGCCTGGAGTGGATCGCA
TGCATTGCTGCTGGTAGTGCTGGTATCACTTACGACGCGAACTGGGCGAAAGGCCGGTTCACCATCTCCAGAGACAA
TTCCAAGAACACGCTGTATCTGCAAATGAACAGCCTGAGAGCCGAGGACACGGCCGTATATTACTGTGCGAGATCGG
CGTTTTCGTTCGACTACGCCATGGACCTCTGGGGCCAGGGAACCCTGGTCACCGTCTCGAGCGGTGGAGGCGGTTCA
GGCGGAGGTGGAAGTGGTGGTGGCGGCTCTGGAGGCGGCGGATCTGACATCCAGATGACCCAGTCTCCTTCCACCCT
GTCTGCATCTGTAGGAGACAGAGTCACCATCACTTGCCAGGCCAGTCAGAGCATTAGTTCCCACTTAAACTGGTATC
AGCAGAAACCAGGGAAAGCCCCTAAGCTCCTGATCTATAAGGCATCCACTCTGGCATCTGGGGTCCCATCAAGGTTC
AGCGGCAGTGGATCTGGGACAGAATTTACTCTCACCATCAGCAGCCTGCAGCCTGATGATTTTGCAACTTATTACTG
CCAACAGGGTTATAGTTGGGGTAATGTTGATAATGTTTTCGGCTGCGGGACCAAGGTGGAGATCAAAGGTGGTGGCG
GCTCTGGAGGAGGAGGGTCCGGACGGTCGCTGGTGGAGTCTGGGGGAGGCTTGGTCCAGCCTGGGGGGTCCCTGAGA
CTCTCCTGTACTGCCTCTGGATTCACCATCAGTAGCTACCACATGCAGTGGGTCCGGCAGGCACCTGGGAAGTGCCT
GGAGTACATCGGAACCATTAGTAGTGGTGGTAATGTATACTACGCAAGCTCCGCTAGAGGCAGATTCACCATCTCCA
GACCCTCGTCCAAGAACACGGTGGATCTTCAAATGAACAGCCTGAGAGCCGAGGACACGGCTGTGTATTACTGTGCG
AGAGACTCTGGTTATAGTGATCCTATGTGGGGCCAGGGAACCCTGGTCACCGTCTCTTCAGGCGGTGGCGGTAGTGG
GGGAGGCGGTTCTGGCGGCGGAGGGTCCGGCGGTGGAGGATCAGACGTTGTGATGACCCAGTCTCCATCTTCCGTGT
CTGCATCTGTAGGAGACAGAGTCACCATCACCTGTCAGGCCAGTCAGAACATTAGGACTTACTTATCCTGGTATCAG
CAGAAACCAGGGAAAGCCCCTAAGCTCCTGATCTATGCTGCAGCCAATCTGGCATCTGGGGTCCCATCAAGGTTCAG
CGGCAGTGGATCTGGGACAGATTTCACTCTCACCATCAGCGACTTGGAACCTGGCGATGCTGCAACTTACTATTGTC
AGTCTACCTATCTTGGTACTGATTATGTTGGCGGTGCTTTCGGCTGTGGGACCAAGGTGGAGATCAAATGA
>SEQ ID 150 SI-55E8 chain A aa
DVVMTQSPSTLSASVGDRVTINCQASESISSWLAWYQQKPGKAPKLLIYEASKLASGVPSRFSGSGSGTEFTLTISS
LQPDDFATYYCQGYFYFISRTYVNSFGCGTKVEIKGGGGSGGGGSGGGGSGGGGSEVQLVESGGGLVQPGGSLRLSC
AASGFTISTNAMSWVRQAPGKCLEWIGVITGRDITYYASWAKGRFTISRDNSKNTLYLQMNSLRAEDTAVYYCARDG
GSSAITSNNIWGQGTLVTVSTGGGGSGGGGSQVQLKQSGPGLVQPSQSLSITCTVSGFSLTNYGVHWVRQSPGKGLE
WLGVIWSGGNTDYNTPFTSRLSINKDNSKSQVFFKMNSLQSNDTAIYYCARALTYYDYEFAYWGQGTLVTVSSASTK
GPSVFPLAPSSKSTSGGTAALGCLVKDYFPEPVTVSWNSGALTSGVHTFPAVLQSSGLYSLSSVVTVPSSSLGTQTY
ICNVNHKPSNTKVDKRVEPKSCDKTHTCPPCPAPEAAGGPSVFLFPPKPKDTLMISRTPEVTCVVVDVSHEDPEVKF
NWYVDGVEVHNAKTKPREEQYASTYRVVSVLTVLHQDWLNGKEYKCAVSNKALPAPIEKTISKAKGQPREPQVYTLP
PSRDELTKNQVSLTCLVKGFYPSDIAVEWESNGQPENNYKTTPPVLDSDGSFFLYSKLTVDKSRWQQGNVFSCSVMH
EALHNHYTQKSLSLSPGGGGGSGGGGSEVQLLESGGGLVQPGGSLRLSCAASGFSFSSGYDMCWVRQAPGKCLEWIA
CIAAGSAGITYDANWAKGRFTISRDNSKNTLYLQMNSLRAEDTAVYYCARSAFSFDYAMDLWGQGTLVTVSSGGGGS
GGGGSGGGGSGGGGSDIQMTQSPSTLSASVGDRVTITCQASQSISSHLNWYQQKPGKAPKLLIYKASTLASGVPSRF
SGSGSGTEFTLTISSLQPDDFATYYCQQGYSWGNVDNVFGCGTKVEIKGGGGSGGGGSGRSLVESGGGLVQPGGSLR
LSCTASGFTISSYHMQWVRQAPGKCLEYIGTISSGGNVYYASSARGRFTISRPSSKNTVDLQMNSLRAEDTAVYYCA
RDSGYSDPMWGQGTLVTVSSGGGGSGGGGSGGGGSGGGGSDVVMTQSPSSVSASVGDRVTITCQASQNIRTYLSWYQ
QKPGKAPKLLIYAAANLASGVPSRFSGSGSGTDFTLTISDLEPGDAATYYCQSTYLGTDYVGGAFGCGTKVEIK
>SEQ ID 151 SI-55E2 chain A nt
GACGTCGTGATGACCCAGTCTCCTTCCACCCTGTCTGCATCTGTAGGAGACAGAGTCACCATCAATTGCCAAGCCAG
TGAGAGCATTAGCAGTTGGTTAGCCTGGTATCAGCAGAAACCAGGGAAAGCCCCTAAGCTCCTGATCTATGAAGCAT
CCAAACTGGCATCTGGGGTCCCATCAAGGTTCAGCGGCAGTGGATCTGGGACAGAATTTACTCTCACCATCAGCAGC
CTGCAGCCTGATGATTTTGCAACTTATTACTGCCAAGGCTATTTTTATTTTATTAGTCGTACTTATGTAAATTCTTT
CGGCGGAGGGACCAAGGTGGAGATCAAAGGCGGTGGCGGTAGTGGGGGAGGCGGTTCTGGCGGCGGAGGGTCCGGCG
GTGGAGGATCAGAGGTGCAGCTGGTGGAGTCTGGGGGAGGCTTGGTCCAGCCTGGGGGGTCCCTGAGACTCTCCTGT
GCAGCCTCTGGATTCACCATCAGTACCAATGCAATGAGCTGGGTCCGCCAGGCTCCAGGGAAGGGGCTGGAGTGGAT
CGGAGTCATTACTGGTCGTGATATCACATACTACGCGAGCTGGGCGAAAGGCAGATTCACCATCTCCAGAGACAATT
CCAAGAACACGCTGTATCTTCAAATGAACAGCCTGAGAGCCGAGGACACGGCTGTGTATTACTGTGCGAGAGACGGT
GGTTCTTCTGCTATTACTAGTAACAACATTTGGGGCCAGGGAACCCTGGTCACCGTGTCGACAGGCGGTGGAGGGTC
CGGCGGTGGTGGATCACAGGTGCAGCTGCAGGAGTCGGGCCCAGGACTGGTGAAGCCTTCGGAGACCCTGTCCCTCA
CCTGCACTGTCTCTGGTGGCTCCGTCAGCAGTGGTGATTACTACTGGACCTGGATCCGGCAGTCCCCAGGGAAGGGA
CTGGAGTGGATTGGACACATCTATTACAGTGGGAACACCAATTATAACCCCTCCCTCAAGAGCCGACTCACCATATC
AATTGACACGTCCAAGACTCAGTTCTCCCTGAAGCTGAGTTCTGTGACCGCTGCGGACACGGCCATTTATTACTGTG
TGCGAGATCGAGTGACTGGTGCTTTTGATATCTGGGGCCAAGGGACAATGGTCACCGTCTCGAGCGCTAGCACCAAG
GGCCCATCGGTCTTCCCCCTGGCACCCTCCTCCAAGAGCACCTCTGGGGGCACAGCGGCCCTGGGCTGCCTGGTCAA
GGACTACTTCCCCGAACCGGTGACGGTGTCGTGGAACTCAGGCGCCCTGACCAGCGGCGTGCACACCTTCCCGGCTG
TCCTACAGTCCTCAGGACTCTACTCCCTCAGCAGCGTGGTGACCGTGCCCTCCAGCAGCTTGGGCACCCAGACCTAC
ATCTGCAACGTGAATCACAAGCCCAGCAACACCAAGGTGGACAAGAGAGTTGAGCCCAAATCTTGTGACAAAACTCA
CACATGCCCACCGTGCCCAGCACCTGAAGCCGCGGGGGCACCGTCAGTCTTCCTCTTCCCCCCAAAACCCAAGGACA
CCCTCATGATCTCCCGGACCCCTGAGGTCACATGCGTGGTGGTGGACGTGAGCCACGAAGACCCTGAGGTCAAGTTC
AACTGGTACGTGGACGGCGTGGAGGTGCATAATGCCAAGACAAAGCCGCGGGAGGAGCAGTACAACAGCACGTACCG
TGTGGTCAGCGTCCTCACCGTCCTGCACCAGGACTGGCTGAATGGCAAGGAGTACAAGTGCGCGGTCTCCAACAAAG
CCCTCCCAGCCCCCATCGAGAAAACCATCTCCAAAGCCAAAGGGCAGCCCCGAGAACCACAGGTGTACACCCTGCCC
CCATCCCGGGATGAGCTGACCAAGAACCAGGTCAGCCTGACCTGCCTGGTCAAAGGCTTCTATCCCAGCGACATCGC
CGTGGAGTGGGAGAGCAATGGGCAGCCGGAGAACAACTACAAGACCACGCCTCCCGTGCTGGACTCCGACGGCTCCT
TCTTCCTCTATAGCAAGCTCACCGTGGACAAGAGCAGGTGGCAGCAGGGGAACGTCTTCTCATGCTCCGTGATGCAT
GAGGCTCTGCACAACCACTACACGCAGAAGAGCCTCTCCCTGTCTCCGGGTGGCGGTGGAGGGTCCGGCGGTGGTGG
ATCCGAGGTGCAGCTGTTGGAGTCTGGGGGAGGCTTGGTACAGCCTGGGGGGTCCCTGAGACTCTCCTGTGCAGCCT
CTGGATTCTCCTTCAGTAGCGGGTACGACATGTGCTGGGTCCGCCAGGCTCCAGGGAAGGGGCTGGAGTGGATCGCA
TGCATTGCTGCTGGTAGTGCTGGTATCACTTACGACGCGAACTGGGCGAAAGGCCGGTTCACCATCTCCAGAGACAA
TTCCAAGAACACGCTGTATCTGCAAATGAACAGCCTGAGAGCCGAGGACACGGCCGTATATTACTGTGCGAGATCGG
CGTTTTCGTTCGACTACGCCATGGACCTCTGGGGCCAGGGAACCCTGGTCACCGTCTCGAGCGGTGGAGGCGGATCT
GGCGGAGGTGGTTCCGGCGGTGGCGGCTCCGGTGGAGGCGGCTCTGACATCCAGATGACCCAGTCTCCTTCCACCCT
GTCTGCATCTGTAGGAGACAGAGTCACCATCACTTGCCAGGCCAGTCAGAGCATTAGTTCCCACTTAAACTGGTATC
AGCAGAAACCAGGGAAAGCCCCTAAGCTCCTGATCTATAAGGCATCCACTCTGGCATCTGGGGTCCCATCAAGGTTC
AGCGGCAGTGGATCTGGGACAGAATTTACTCTCACCATCAGCAGCCTGCAGCCTGATGATTTTGCAACTTATTACTG
CCAACAGGGTTATAGTTGGGGTAATGTTGATAATGTTTTCGGCGGAGGGACCAAGGTGGAGATCAAAGGCGGTGGAG
GGTCCGGCGGTGGTGGCTCCGGACGGTCGCTGGTGGAGTCTGGGGGAGGCTTGGTCCAGCCTGGGGGGTCCCTGAGA
CTCTCCTGTACTGCCTCTGGATTCACCATCAGTAGCTACCACATGCAGTGGGTCCGCCAGGCTCCAGGGAAGGGGCT
GGAGTACATCGGAACCATTAGTAGTGGTGGTAATGTATACTACGCAAGCTCCGCTAGAGGCAGATTCACCATCTCCA
GACCCTCGTCCAAGAACACGGTGGATCTTCAAATGAACAGCCTGAGAGCCGAGGACACGGCTGTGTATTACTGTGCG
AGAGACTCTGGTTATAGTGATCCTATGTGGGGCCAGGGAACCCTGGTCACCGTCTCTTCAGGCGGTGGCGGTAGTGG
GGGAGGCGGTTCTGGCGGCGGAGGGTCCGGCGGTGGAGGATCAGACGTTGTGATGACCCAGTCTCCATCTTCCGTGT
CTGCATCTGTAGGAGACAGAGTCACCATCACCTGTCAGGCCAGTCAGAACATTAGGACTTACTTATCCTGGTATCAG
CAGAAACCAGGGAAAGCCCCTAAGCTCCTGATCTATGCTGCAGCCAATCTGGCATCTGGGGTCCCATCAAGGTTCAG
CGGCAGTGGATCTGGGACAGATTTCACTCTCACCATCAGCGACCTGGAGCCTGGCGATGCTGCAACTTACTATTGTC
AGTCTACCTATCTTGGTACTGATTATGTTGGCGGTGCTTTCGGCGGAGGGACCAAGGTGGAGATCAAATGA
>SEQ ID 152 SI-55E2 chain A aa
DVVMTQSPSTLSASVGDRVTINCQASESISSWLAWYQQKPGKAPKLLIYEASKLASGVPSRFSGSGSGTEFTLTISS
LQPDDFATYYCQGYFYFISRTYVNSFGGGTKVEIKGGGGSGGGGSGGGGSGGGGSEVQLVESGGGLVQPGGSLRLSC
AASGFTISTNAMSWVRQAPGKGLEWIGVITGRDITYYASWAKGRFTISRDNSKNTLYLQMNSLRAEDTAVYYCARDG
GSSAITSNNIWGQGTLVTVSTGGGGSGGGGSQVQLQESGPGLVKPSETLSLTCTVSGGSVSSGDYYWTWIRQSPGKG
LEWIGHIYYSGNTNYNPSLKSRLTISIDTSKTQFSLKLSSVTAADTAIYYCVRDRVTGAFDIWGQGTMVTVSSASTK
GPSVFPLAPSSKSTSGGTAALGCLVKDYFPEPVTVSWNSGALTSGVHTFPAVLQSSGLYSLSSVVTVPSSSLGTQTY
ICNVNHKPSNTKVDKRVEPKSCDKTHTCPPCPAPEAAGAPSVFLFPPKPKDTLMISRTPEVTCVVVDVSHEDPEVKF
NWYVDGVEVHNAKTKPREEQYNSTYRVVSVLTVLHQDWLNGKEYKCAVSNKALPAPIEKTISKAKGQPREPQVYTLP
PSRDELTKNQVSLTCLVKGFYPSDIAVEWESNGQPENNYKTTPPVLDSDGSFFLYSKLTVDKSRWQQGNVFSCSVMH
EALHNHYTQKSLSLSPGGGGGSGGGGSEVQLLESGGGLVQPGGSLRLSCAASGFSFSSGYDMCWVRQAPGKGLEWIA
CIAAGSAGITYDANWAKGRFTISRDNSKNTLYLQMNSLRAEDTAVYYCARSAFSFDYAMDLWGQGTLVTVSSGGGGS
GGGGSGGGGSGGGGSDIQMTQSPSTLSASVGDRVTITCQASQSISSHLNWYQQKPGKAPKLLIYKASTLASGVPSRF
SGSGSGTEFTLTISSLQPDDFATYYCQQGYSWGNVDNVFGGGTKVEIKGGGGSGGGGSGRSLVESGGGLVQPGGSLR
LSCTASGFTISSYHMQWVRQAPGKGLEYIGTISSGGNVYYASSARGRFTISRPSSKNTVDLQMNSLRAEDTAVYYCA
RDSGYSDPMWGQGTLVTVSSGGGGSGGGGSGGGGSGGGGSDVVMTQSPSSVSASVGDRVTITCQASQNIRTYLSWYQ
QKPGKAPKLLIYAAANLASGVPSRFSGSGSGTDFTLTISDLEPGDAATYYCQSTYLGTDYVGGAFGGGTKVEIK
>SEQ ID 153 SI-55E2 and SI-55E9 chain B nt
GACATCCAGATGACCCAGTCTCCATCCTCCCTGTCTGCATCTGTAGGAGACAGAGTCACCATCACTTGCCAGGCGAG
TCAGGACATCAGCAACTATTTAAATTGGTATCAGCAGAAACCAGGGAAAGCCCCTAAACTCCTGATCTACGATGCAT
CCAATTTGGAAACAGGGGTCCCATCAAGGTTCAGTGGAAGTGGATCTGGGACAGATTTTACTTTCACCATCAGCAGC
CTGCAGCCTGAAGATATTGCAACATATTTCTGTCAACACTTTGATCATCTCCCGCTCGCTTTCGGCGGAGGGACCAA
GGTGGAAATTAAACGTACGGTGGCTGCACCATCTGTCTTCATCTTCCCGCCATCTGATGAGCAGTTGAAATCTGGAA
CTGCCTCTGTTGTGTGCCTGCTGAATAACTTCTATCCCAGAGAGGCCAAAGTACAGTGGAAGGTGGATAACGCCCTC
CAATCGGGTAACTCCCAGGAGAGTGTCACAGAGCAGGACAGCAAGGACAGCACCTACAGCCTCAGCAGCACCCTGAC
GCTGAGCAAAGCAGACTACGAGAAACACAAAGTCTACGCCTGCGAAGTCACCCATCAGGGCCTGAGCTCGCCCGTCA
CAAAGAGCTTCAACAGGGGAGAGTGTTAG
>SEQ ID 154 SI-55E2 and SI-55E9 chain B aa
DIQMTQSPSSLSASVGDRVTITCQASQDISNYLNWYQQKPGKAPKLLIYDASNLETGVPSRFSGSGSGTDFTFTISS
LQPEDIATYFCQHFDHLPLAFGGGTKVEIKRTVAAPSVFIFPPSDEQLKSGTASVVCLLNNFYPREAKVQWKVDNAL
QSGNSQESVTEQDSKDSTYSLSSTLTLSKADYEKHKVYACEVTHQGLSSPVTKSFNRGEC
>SEQ ID 155 SI-55E9 chain A nt
GACGTCGTGATGACCCAGTCTCCTTCCACCCTGTCTGCATCTGTAGGAGACAGAGTCACCATCAATTGCCAAGCCAG
TGAGAGCATTAGCAGTTGGTTAGCCTGGTATCAGCAGAAACCAGGGAAAGCCCCTAAGCTCCTGATCTATGAAGCAT
CCAAACTGGCATCTGGGGTCCCATCAAGGTTCAGCGGCAGTGGATCTGGGACAGAATTTACTCTCACCATCAGCAGC
CTGCAGCCTGATGATTTTGCAACTTATTACTGCCAAGGCTATTTTTATTTTATTAGTCGTACTTATGTAAATTCTTT
CGGCTGTGGGACCAAGGTGGAGATCAAAGGTGGAGGCGGTTCAGGCGGAGGTGGAAGTGGTGGTGGCGGCTCTGGAG
GCGGCGGATCTGAGGTGCAGCTGGTGGAGTCTGGGGGAGGCTTGGTCCAGCCTGGGGGGTCCCTGAGACTCTCCTGT
GCAGCCTCTGGATTCACCATCAGTACCAATGCAATGAGCTGGGTCCGCCAGGCTCCAGGGAAGTGCCTGGAGTGGAT
CGGAGTCATTACTGGTCGTGATATCACATACTACGCGAGCTGGGCGAAAGGCAGATTCACCATCTCCAGAGACAATT
CCAAGAACACGCTGTATCTTCAAATGAACAGCCTGAGAGCCGAGGACACGGCTGTGTATTACTGTGCGAGAGACGGT
GGTTCTTCTGCTATTACTAGTAACAACATTTGGGGCCAGGGAACCCTGGTCACCGTGTCGACAGGCGGTGGAGGGTC
CGGCGGTGGTGGATCACAGGTGCAGCTGCAGGAGTCGGGCCCAGGACTGGTGAAGCCTTCGGAGACCCTGTCCCTCA
CCTGCACTGTCTCTGGTGGCTCCGTCAGCAGTGGTGATTACTACTGGACCTGGATCCGGCAGTCCCCAGGGAAGGGA
CTGGAGTGGATTGGACACATCTATTACAGTGGGAACACCAATTATAACCCCTCCCTCAAGAGCCGACTCACCATATC
AATTGACACGTCCAAGACTCAGTTCTCCCTGAAGCTGAGTTCTGTGACCGCTGCGGACACGGCCATTTATTACTGTG
TGCGAGATCGAGTGACTGGTGCTTTTGATATCTGGGGCCAAGGGACAATGGTCACCGTCTCGAGCGCTAGCACCAAG
GGCCCATCGGTCTTCCCCCTGGCACCCTCCTCCAAGAGCACCTCTGGGGGCACAGCGGCCCTGGGCTGCCTGGTCAA
GGACTACTTCCCCGAACCGGTGACGGTGTCGTGGAACTCAGGCGCCCTGACCAGCGGCGTGCACACCTTCCCGGCTG
TCCTACAGTCCTCAGGACTCTACTCCCTCAGCAGCGTGGTGACCGTGCCCTCCAGCAGCTTGGGCACCCAGACCTAC
ATCTGCAACGTGAATCACAAGCCCAGCAACACCAAGGTGGACAAGAGAGTTGAGCCCAAATCTTGTGACAAAACTCA
CACATGCCCACCGTGCCCAGCACCTGAAGCCGCGGGGGGACCGTCAGTCTTCCTCTTCCCCCCAAAACCCAAGGACA
CCCTCATGATCTCCCGGACCCCTGAGGTCACATGCGTGGTGGTGGACGTGAGCCACGAAGACCCTGAGGTCAAGTTC
AACTGGTACGTGGACGGCGTGGAGGTGCATAATGCCAAGACAAAGCCGCGGGAGGAGCAGTACGCCAGCACGTACCG
TGTGGTCAGCGTCCTCACCGTCCTGCACCAGGACTGGCTGAATGGCAAGGAGTACAAGTGCGCGGTCTCCAACAAAG
CCCTCCCAGCCCCCATCGAGAAAACCATCTCCAAAGCCAAAGGGCAGCCCCGAGAACCACAGGTGTACACCCTGCCC
CCATCCCGGGATGAGCTGACCAAGAACCAGGTCAGCCTGACCTGCCTGGTCAAAGGCTTCTATCCCAGCGACATCGC
CGTGGAGTGGGAGAGCAATGGGCAGCCGGAGAACAACTACAAGACCACGCCTCCCGTGCTGGACTCCGACGGCTCCT
TCTTCCTCTATAGCAAGCTCACCGTGGACAAGAGCAGGTGGCAGCAGGGGAACGTCTTCTCATGCTCCGTGATGCAT
GAGGCTCTGCACAACCACTACACGCAGAAGAGCCTCTCCCTGTCTCCGGGTGGCGGTGGAGGGTCCGGCGGTGGTGG
ATCCGAGGTGCAGCTGTTGGAGTCTGGGGGAGGCTTGGTACAGCCTGGGGGGTCCCTGAGACTCTCCTGTGCAGCCT
CTGGATTCTCCTTCAGTAGCGGGTACGACATGTGCTGGGTCCGCCAGGCTCCAGGGAAGTGCCTGGAGTGGATCGCA
TGCATTGCTGCTGGTAGTGCTGGTATCACTTACGACGCGAACTGGGCGAAAGGCCGGTTCACCATCTCCAGAGACAA
TTCCAAGAACACGCTGTATCTGCAAATGAACAGCCTGAGAGCCGAGGACACGGCCGTATATTACTGTGCGAGATCGG
CGTTTTCGTTCGACTACGCCATGGACCTCTGGGGCCAGGGAACCCTGGTCACCGTCTCGAGCGGTGGAGGCGGTTCA
GGCGGAGGTGGAAGTGGTGGTGGCGGCTCTGGAGGCGGCGGATCTGACATCCAGATGACCCAGTCTCCTTCCACCCT
GTCTGCATCTGTAGGAGACAGAGTCACCATCACTTGCCAGGCCAGTCAGAGCATTAGTTCCCACTTAAACTGGTATC
AGCAGAAACCAGGGAAAGCCCCTAAGCTCCTGATCTATAAGGCATCCACTCTGGCATCTGGGGTCCCATCAAGGTTC
AGCGGCAGTGGATCTGGGACAGAATTTACTCTCACCATCAGCAGCCTGCAGCCTGATGATTTTGCAACTTATTACTG
CCAACAGGGTTATAGTTGGGGTAATGTTGATAATGTTTTCGGCTGCGGGACCAAGGTGGAGATCAAAGGTGGTGGCG
GCTCTGGAGGAGGAGGGTCCGGACGGTCGCTGGTGGAGTCTGGGGGAGGCTTGGTCCAGCCTGGGGGGTCCCTGAGA
CTCTCCTGTACTGCCTCTGGATTCACCATCAGTAGCTACCACATGCAGTGGGTCCGGCAGGCACCTGGGAAGTGCCT
GGAGTACATCGGAACCATTAGTAGTGGTGGTAATGTATACTACGCAAGCTCCGCTAGAGGCAGATTCACCATCTCCA
GACCCTCGTCCAAGAACACGGTGGATCTTCAAATGAACAGCCTGAGAGCCGAGGACACGGCTGTGTATTACTGTGCG
AGAGACTCTGGTTATAGTGATCCTATGTGGGGCCAGGGAACCCTGGTCACCGTCTCTTCAGGCGGTGGCGGTAGTGG
GGGAGGCGGTTCTGGCGGCGGAGGGTCCGGCGGTGGAGGATCAGACGTTGTGATGACCCAGTCTCCATCTTCCGTGT
CTGCATCTGTAGGAGACAGAGTCACCATCACCTGTCAGGCCAGTCAGAACATTAGGACTTACTTATCCTGGTATCAG
CAGAAACCAGGGAAAGCCCCTAAGCTCCTGATCTATGCTGCAGCCAATCTGGCATCTGGGGTCCCATCAAGGTTCAG
CGGCAGTGGATCTGGGACAGATTTCACTCTCACCATCAGCGACTTGGAACCTGGCGATGCTGCAACTTACTATTGTC
AGTCTACCTATCTTGGTACTGATTATGTTGGCGGTGCTTTCGGCTGTGGGACCAAGGTGGAGATCAAATGA
>SEQ ID 156 SI-55E9 chain A aa
DVVMTQSPSTLSASVGDRVTINCQASESISSWLAWYQQKPGKAPKLLIYEASKLASGVPSRFSGSGSGTEFTLTISS
LQPDDFATYYCQGYFYFISRTYVNSFGCGTKVEIKGGGGSGGGGSGGGGSGGGGSEVQLVESGGGLVQPGGSLRLSC
AASGFTISTNAMSWVRQAPGKCLEWIGVITGRDITYYASWAKGRFTISRDNSKNTLYLQMNSLRAEDTAVYYCARDG
GSSAITSNNIWGQGTLVTVSTGGGGSGGGGSQVQLQESGPGLVKPSETLSLTCTVSGGSVSSGDYYWTWIRQSPGKG
LEWIGHIYYSGNTNYNPSLKSRLTISIDTSKTQFSLKLSSVTAADTAIYYCVRDRVTGAFDIWGQGTMVTVSSASTK
GPSVFPLAPSSKSTSGGTAALGCLVKDYFPEPVTVSWNSGALTSGVHTFPAVLQSSGLYSLSSVVTVPSSSLGTQTY
ICNVNHKPSNTKVDKRVEPKSCDKTHTCPPCPAPEAAGGPSVFLFPPKPKDTLMISRTPEVTCVVVDVSHEDPEVKF
NWYVDGVEVHNAKTKPREEQYASTYRVVSVLTVLHQDWLNGKEYKCAVSNKALPAPIEKTISKAKGQPREPQVYTLP
PSRDELTKNQVSLTCLVKGFYPSDIAVEWESNGQPENNYKTTPPVLDSDGSFFLYSKLTVDKSRWQQGNVFSCSVMH
EALHNHYTQKSLSLSPGGGGGSGGGGSEVQLLESGGGLVQPGGSLRLSCAASGFSFSSGYDMCWVRQAPGKCLEWIA
CIAAGSAGITYDANWAKGRFTISRDNSKNTLYLQMNSLRAEDTAVYYCARSAFSFDYAMDLWGQGTLVTVSSGGGGS
GGGGSGGGGSGGGGSDIQMTQSPSTLSASVGDRVTITCQASQSISSHLNWYQQKPGKAPKLLIYKASTLASGVPSRF
SGSGSGTEFTLTISSLQPDDFATYYCQQGYSWGNVDNVFGCGTKVEIKGGGGSGGGGSGRSLVESGGGLVQPGGSLR
LSCTASGFTISSYHMQWVRQAPGKCLEYIGTISSGGNVYYASSARGRFTISRPSSKNTVDLQMNSLRAEDTAVYYCA
RDSGYSDPMWGQGTLVTVSSGGGGSGGGGSGGGGSGGGGSDVVMTQSPSSVSASVGDRVTITCQASQNIRTYLSWYQ
QKPGKAPKLLIYAAANLASGVPSRFSGSGSGTDFTLTISDLEPGDAATYYCQSTYLGTDYVGGAFGCGTKVEIK
>SEQ ID 157 SI-55E3 chain A nt
GACGTCGTGATGACCCAGTCTCCTTCCACCCTGTCTGCATCTGTAGGAGACAGAGTCACCATCAATTGCCAAGCCAG
TGAGAGCATTAGCAGTTGGTTAGCCTGGTATCAGCAGAAACCAGGGAAAGCCCCTAAGCTCCTGATCTATGAAGCAT
CCAAACTGGCATCTGGGGTCCCATCAAGGTTCAGCGGCAGTGGATCTGGGACAGAATTTACTCTCACCATCAGCAGC
CTGCAGCCTGATGATTTTGCAACTTATTACTGCCAAGGCTATTTTTATTTTATTAGTCGTACTTATGTAAATTCTTT
CGGCGGAGGGACCAAGGTGGAGATCAAAGGCGGTGGCGGTAGTGGGGGAGGCGGTTCTGGCGGCGGAGGGTCCGGCG
GTGGAGGATCAGAGGTGCAGCTGGTGGAGTCTGGGGGAGGCTTGGTCCAGCCTGGGGGGTCCCTGAGACTCTCCTGT
GCAGCCTCTGGATTCACCATCAGTACCAATGCAATGAGCTGGGTCCGCCAGGCTCCAGGGAAGGGGCTGGAGTGGAT
CGGAGTCATTACTGGTCGTGATATCACATACTACGCGAGCTGGGCGAAAGGCAGATTCACCATCTCCAGAGACAATT
CCAAGAACACGCTGTATCTTCAAATGAACAGCCTGAGAGCCGAGGACACGGCTGTGTATTACTGTGCGAGAGACGGT
GGTTCTTCTGCTATTACTAGTAACAACATTTGGGGCCAGGGAACCCTGGTCACCGTGTCGACAGGCGGTGGAGGGTC
CGGCGGTGGTGGATCACAGGTGCAGCTGCAGCAGAGCGGCGCCGAGGTGAAGAAGCCCGGCAGCAGCGTGAAGGTGA
GCTGCAAGGCCAGCGGCTACACCTTCACCAACTACTACATCTACTGGGTGCGGCAGGCCCCCGGCCAGGGCCTGGAG
TGGATCGGCGGCATCAACCCCACCAGCGGCGGCAGCAACTTCAACGAGAAGTTCAAGACCCGGGTGACCATCACCGC
CGACGAGAGCAGCACCACCGCCTACATGGAGCTGAGCAGCCTGCGGAGCGAGGACACCGCCTTCTACTTCTGCACCC
GGCAGGGCCTGTGGTTCGACAGCGACGGCCGGGGCTTCGACTTCTGGGGCCAGGGCACCACCGTGACCGTGAGCAGC
GCTAGCACCAAGGGCCCATCGGTCTTCCCCCTGGCACCCTCCTCCAAGAGCACCTCTGGGGGCACAGCGGCCCTGGG
CTGCCTGGTCAAGGACTACTTCCCCGAACCGGTGACGGTGTCGTGGAACTCAGGCGCCCTGACCAGCGGCGTGCACA
CCTTCCCGGCTGTCCTACAGTCCTCAGGACTCTACTCCCTCAGCAGCGTGGTGACCGTGCCCTCCAGCAGCTTGGGC
ACCCAGACCTACATCTGCAACGTGAATCACAAGCCCAGCAACACCAAGGTGGACAAGAGAGTTGAGCCCAAATCTTG
TGACAAAACTCACACATGCCCACCGTGCCCAGCACCTGAAGCCGCGGGGGCACCGTCAGTCTTCCTCTTCCCCCCAA
AACCCAAGGACACCCTCATGATCTCCCGGACCCCTGAGGTCACATGCGTGGTGGTGGACGTGAGCCACGAAGACCCT
GAGGTCAAGTTCAACTGGTACGTGGACGGCGTGGAGGTGCATAATGCCAAGACAAAGCCGCGGGAGGAGCAGTACAA
CAGCACGTACCGTGTGGTCAGCGTCCTCACCGTCCTGCACCAGGACTGGCTGAATGGCAAGGAGTACAAGTGCGCGG
TCTCCAACAAAGCCCTCCCAGCCCCCATCGAGAAAACCATCTCCAAAGCCAAAGGGCAGCCCCGAGAACCACAGGTG
TACACCCTGCCCCCATCCCGGGATGAGCTGACCAAGAACCAGGTCAGCCTGACCTGCCTGGTCAAAGGCTTCTATCC
CAGCGACATCGCCGTGGAGTGGGAGAGCAATGGGCAGCCGGAGAACAACTACAAGACCACGCCTCCCGTGCTGGACT
CCGACGGCTCCTTCTTCCTCTATAGCAAGCTCACCGTGGACAAGAGCAGGTGGCAGCAGGGGAACGTCTTCTCATGC
TCCGTGATGCATGAGGCTCTGCACAACCACTACACGCAGAAGAGCCTCTCCCTGTCTCCGGGTGGCGGTGGAGGGTC
CGGCGGTGGTGGATCCGAGGTGCAGCTGTTGGAGTCTGGGGGAGGCTTGGTACAGCCTGGGGGGTCCCTGAGACTCT
CCTGTGCAGCCTCTGGATTCTCCTTCAGTAGCGGGTACGACATGTGCTGGGTCCGCCAGGCTCCAGGGAAGGGGCTG
GAGTGGATCGCATGCATTGCTGCTGGTAGTGCTGGTATCACTTACGACGCGAACTGGGCGAAAGGCCGGTTCACCAT
CTCCAGAGACAATTCCAAGAACACGCTGTATCTGCAAATGAACAGCCTGAGAGCCGAGGACACGGCCGTATATTACT
GTGCGAGATCGGCGTTTTCGTTCGACTACGCCATGGACCTCTGGGGCCAGGGAACCCTGGTCACCGTCTCGAGCGGT
GGAGGCGGATCTGGCGGAGGTGGTTCCGGCGGTGGCGGCTCCGGTGGAGGCGGCTCTGACATCCAGATGACCCAGTC
TCCTTCCACCCTGTCTGCATCTGTAGGAGACAGAGTCACCATCACTTGCCAGGCCAGTCAGAGCATTAGTTCCCACT
TAAACTGGTATCAGCAGAAACCAGGGAAAGCCCCTAAGCTCCTGATCTATAAGGCATCCACTCTGGCATCTGGGGTC
CCATCAAGGTTCAGCGGCAGTGGATCTGGGACAGAATTTACTCTCACCATCAGCAGCCTGCAGCCTGATGATTTTGC
AACTTATTACTGCCAACAGGGTTATAGTTGGGGTAATGTTGATAATGTTTTCGGCGGAGGGACCAAGGTGGAGATCA
AAGGCGGTGGAGGGTCCGGCGGTGGTGGCTCCGGACGGTCGCTGGTGGAGTCTGGGGGAGGCTTGGTCCAGCCTGGG
GGGTCCCTGAGACTCTCCTGTACTGCCTCTGGATTCACCATCAGTAGCTACCACATGCAGTGGGTCCGCCAGGCTCC
AGGGAAGGGGCTGGAGTACATCGGAACCATTAGTAGTGGTGGTAATGTATACTACGCAAGCTCCGCTAGAGGCAGAT
TCACCATCTCCAGACCCTCGTCCAAGAACACGGTGGATCTTCAAATGAACAGCCTGAGAGCCGAGGACACGGCTGTG
TATTACTGTGCGAGAGACTCTGGTTATAGTGATCCTATGTGGGGCCAGGGAACCCTGGTCACCGTCTCTTCAGGCGG
TGGCGGTAGTGGGGGAGGCGGTTCTGGCGGCGGAGGGTCCGGCGGTGGAGGATCAGACGTTGTGATGACCCAGTCTC
CATCTTCCGTGTCTGCATCTGTAGGAGACAGAGTCACCATCACCTGTCAGGCCAGTCAGAACATTAGGACTTACTTA
TCCTGGTATCAGCAGAAACCAGGGAAAGCCCCTAAGCTCCTGATCTATGCTGCAGCCAATCTGGCATCTGGGGTCCC
ATCAAGGTTCAGCGGCAGTGGATCTGGGACAGATTTCACTCTCACCATCAGCGACCTGGAGCCTGGCGATGCTGCAA
CTTACTATTGTCAGTCTACCTATCTTGGTACTGATTATGTTGGCGGTGCTTTCGGCGGAGGGACCAAGGTGGAGATC
AAATGA
>SEQ ID 158 SI-55E3 chain A aa
DVVMTQSPSTLSASVGDRVTINCQASESISSWLAWYQQKPGKAPKLLIYEASKLASGVPSRFSGSGSGTEFTLTISS
LQPDDFATYYCQGYFYFISRTYVNSFGGGTKVEIKGGGGSGGGGSGGGGSGGGGSEVQLVESGGGLVQPGGSLRLSC
AASGFTISTNAMSWVRQAPGKGLEWIGVITGRDITYYASWAKGRFTISRDNSKNTLYLQMNSLRAEDTAVYYCARDG
GSSAITSNNIWGQGTLVTVSTGGGGSGGGGSQVQLQQSGAEVKKPGSSVKVSCKASGYTFTNYYIYWVRQAPGQGLE
WIGGINPTSGGSNFNEKFKTRVTITADESSTTAYMELSSLRSEDTAFYFCTRQGLWFDSDGRGFDFWGQGTTVTVSS
ASTKGPSVFPLAPSSKSTSGGTAALGCLVKDYFPEPVTVSWNSGALTSGVHTFPAVLQSSGLYSLSSVVTVPSSSLG
TQTYICNVNHKPSNTKVDKRVEPKSCDKTHTCPPCPAPEAAGAPSVFLFPPKPKDTLMISRTPEVTCVVVDVSHEDP
EVKFNWYVDGVEVHNAKTKPREEQYNSTYRVVSVLTVLHQDWLNGKEYKCAVSNKALPAPIEKTISKAKGQPREPQV
YTLPPSRDELTKNQVSLTCLVKGFYPSDIAVEWESNGQPENNYKTTPPVLDSDGSFFLYSKLTVDKSRWQQGNVFSC
SVMHEALHNHYTQKSLSLSPGGGGGSGGGGSEVQLLESGGGLVQPGGSLRLSCAASGFSFSSGYDMCWVRQAPGKGL
EWIACIAAGSAGITYDANWAKGRFTISRDNSKNTLYLQMNSLRAEDTAVYYCARSAFSFDYAMDLWGQGTLVTVSSG
GGGSGGGGSGGGGSGGGGSDIQMTQSPSTLSASVGDRVTITCQASQSISSHLNWYQQKPGKAPKLLIYKASTLASGV
PSRFSGSGSGTEFTLTISSLQPDDFATYYCQQGYSWGNVDNVFGGGTKVEIKGGGGSGGGGSGRSLVESGGGLVQPG
GSLRLSCTASGFTISSYHMQWVRQAPGKGLEYIGTISSGGNVYYASSARGRFTISRPSSKNTVDLQMNSLRAEDTAV
YYCARDSGYSDPMWGQGTLVTVSSGGGGSGGGGSGGGGSGGGGSDVVMTQSPSSVSASVGDRVTITCQASQNIRTYL
SWYQQKPGKAPKLLIYAAANLASGVPSRFSGSGSGTDFTLTISDLEPGDAATYYCQSTYLGTDYVGGAFGGGTKVEI
K
>SEQ ID 159 SI-55E3 and SI-55E10 chain B nt
GATATTCAAATGACTCAATCTCCTTCTTCTCTTTCTGCTTCTGTTGGTGATCGTGTTACTATTACTTGTCGTTCTTC
TCAAAATATTGTTCATTCTAATGGTAATACTTATCTTGATTGGTATCAACAAACTCCTGGTAAAGCTCCTAAACTTC
TTATTTATAAAGTTTCTAATCGTTTTTCTGGTGTTCCTTCTCGTTTTTCTGGTTCTGGTTCTGGTACTGATTTTACT
TTTACTATTTCTTCTCTTCAACCTGAAGATATTGCTACTTATTATTGTTTTCAATATTCTCATGTTCCTTGGACTTT
TGGTCAAGGTACTAAACTTCAAATTACTCGTACGGTGGCTGCACCATCTGTCTTCATCTTCCCGCCATCTGATGAGC
AGTTGAAATCTGGAACTGCCTCTGTTGTGTGCCTGCTGAATAACTTCTATCCCAGAGAGGCCAAAGTACAGTGGAAG
GTGGATAACGCCCTCCAATCGGGTAACTCCCAGGAGAGTGTCACAGAGCAGGACAGCAAGGACAGCACCTACAGCCT
CAGCAGCACCCTGACGCTGAGCAAAGCAGACTACGAGAAACACAAAGTCTACGCCTGCGAAGTCACCCATCAGGGCC
TGAGCTCGCCCGTCACAAAGAGCTTCAACAGGGGAGAGTGTTAG
>SEQ ID 160 SI-55E3 and SI-55E10 chain B aa
DIQMTQSPSSLSASVGDRVTITCRSSQNIVHSNGNTYLDWYQQTPGKAPKLLIYKVSNRFSGVPSRFSGSGSGTDFT
FTISSLQPEDIATYYCFQYSHVPWTFGQGTKLQITRTVAAPSVFIFPPSDEQLKSGTASVVCLLNNFYPREAKVQWK
VDNALQSGNSQESVTEQDSKDSTYSLSSTLTLSKADYEKHKVYACEVTHQGLSSPVTKSFNRGEC
>SEQ ID 161 SI-55E10 chain A nt
GACGTCGTGATGACCCAGTCTCCTTCCACCCTGTCTGCATCTGTAGGAGACAGAGTCACCATCAATTGCCAAGCCAG
TGAGAGCATTAGCAGTTGGTTAGCCTGGTATCAGCAGAAACCAGGGAAAGCCCCTAAGCTCCTGATCTATGAAGCAT
CCAAACTGGCATCTGGGGTCCCATCAAGGTTCAGCGGCAGTGGATCTGGGACAGAATTTACTCTCACCATCAGCAGC
CTGCAGCCTGATGATTTTGCAACTTATTACTGCCAAGGCTATTTTTATTTTATTAGTCGTACTTATGTAAATTCTTT
CGGCTGTGGGACCAAGGTGGAGATCAAAGGTGGAGGCGGTTCAGGCGGAGGTGGAAGTGGTGGTGGCGGCTCTGGAG
GCGGCGGATCTGAGGTGCAGCTGGTGGAGTCTGGGGGAGGCTTGGTCCAGCCTGGGGGGTCCCTGAGACTCTCCTGT
GCAGCCTCTGGATTCACCATCAGTACCAATGCAATGAGCTGGGTCCGCCAGGCTCCAGGGAAGTGCCTGGAGTGGAT
CGGAGTCATTACTGGTCGTGATATCACATACTACGCGAGCTGGGCGAAAGGCAGATTCACCATCTCCAGAGACAATT
CCAAGAACACGCTGTATCTTCAAATGAACAGCCTGAGAGCCGAGGACACGGCTGTGTATTACTGTGCGAGAGACGGT
GGTTCTTCTGCTATTACTAGTAACAACATTTGGGGCCAGGGAACCCTGGTCACCGTGTCGACAGGCGGTGGAGGGTC
CGGCGGTGGTGGATCACAGGTGCAGCTGCAGCAGAGCGGCGCCGAGGTGAAGAAGCCCGGCAGCAGCGTGAAGGTGA
GCTGCAAGGCCAGCGGCTACACCTTCACCAACTACTACATCTACTGGGTGCGGCAGGCCCCCGGCCAGGGCCTGGAG
TGGATCGGCGGCATCAACCCCACCAGCGGCGGCAGCAACTTCAACGAGAAGTTCAAGACCCGGGTGACCATCACCGC
CGACGAGAGCAGCACCACCGCCTACATGGAGCTGAGCAGCCTGCGGAGCGAGGACACCGCCTTCTACTTCTGCACCC
GGCAGGGCCTGTGGTTCGACAGCGACGGCCGGGGCTTCGACTTCTGGGGCCAGGGCACCACCGTGACCGTGAGCAGC
GCTAGCACCAAGGGCCCATCGGTCTTCCCCCTGGCACCCTCCTCCAAGAGCACCTCTGGGGGCACAGCGGCCCTGGG
CTGCCTGGTCAAGGACTACTTCCCCGAACCGGTGACGGTGTCGTGGAACTCAGGCGCCCTGACCAGCGGCGTGCACA
CCTTCCCGGCTGTCCTACAGTCCTCAGGACTCTACTCCCTCAGCAGCGTGGTGACCGTGCCCTCCAGCAGCTTGGGC
ACCCAGACCTACATCTGCAACGTGAATCACAAGCCCAGCAACACCAAGGTGGACAAGAGAGTTGAGCCCAAATCTTG
TGACAAAACTCACACATGCCCACCGTGCCCAGCACCTGAAGCCGCGGGGGGACCGTCAGTCTTCCTCTTCCCCCCAA
AACCCAAGGACACCCTCATGATCTCCCGGACCCCTGAGGTCACATGCGTGGTGGTGGACGTGAGCCACGAAGACCCT
GAGGTCAAGTTCAACTGGTACGTGGACGGCGTGGAGGTGCATAATGCCAAGACAAAGCCGCGGGAGGAGCAGTACGC
CAGCACGTACCGTGTGGTCAGCGTCCTCACCGTCCTGCACCAGGACTGGCTGAATGGCAAGGAGTACAAGTGCGCGG
TCTCCAACAAAGCCCTCCCAGCCCCCATCGAGAAAACCATCTCCAAAGCCAAAGGGCAGCCCCGAGAACCACAGGTG
TACACCCTGCCCCCATCCCGGGATGAGCTGACCAAGAACCAGGTCAGCCTGACCTGCCTGGTCAAAGGCTTCTATCC
CAGCGACATCGCCGTGGAGTGGGAGAGCAATGGGCAGCCGGAGAACAACTACAAGACCACGCCTCCCGTGCTGGACT
CCGACGGCTCCTTCTTCCTCTATAGCAAGCTCACCGTGGACAAGAGCAGGTGGCAGCAGGGGAACGTCTTCTCATGC
TCCGTGATGCATGAGGCTCTGCACAACCACTACACGCAGAAGAGCCTCTCCCTGTCTCCGGGTGGCGGTGGAGGGTC
CGGCGGTGGTGGATCCGAGGTGCAGCTGTTGGAGTCTGGGGGAGGCTTGGTACAGCCTGGGGGGTCCCTGAGACTCT
CCTGTGCAGCCTCTGGATTCTCCTTCAGTAGCGGGTACGACATGTGCTGGGTCCGCCAGGCTCCAGGGAAGTGCCTG
GAGTGGATCGCATGCATTGCTGCTGGTAGTGCTGGTATCACTTACGACGCGAACTGGGCGAAAGGCCGGTTCACCAT
CTCCAGAGACAATTCCAAGAACACGCTGTATCTGCAAATGAACAGCCTGAGAGCCGAGGACACGGCCGTATATTACT
GTGCGAGATCGGCGTTTTCGTTCGACTACGCCATGGACCTCTGGGGCCAGGGAACCCTGGTCACCGTCTCGAGCGGT
GGAGGCGGTTCAGGCGGAGGTGGAAGTGGTGGTGGCGGCTCTGGAGGCGGCGGATCTGACATCCAGATGACCCAGTC
TCCTTCCACCCTGTCTGCATCTGTAGGAGACAGAGTCACCATCACTTGCCAGGCCAGTCAGAGCATTAGTTCCCACT
TAAACTGGTATCAGCAGAAACCAGGGAAAGCCCCTAAGCTCCTGATCTATAAGGCATCCACTCTGGCATCTGGGGTC
CCATCAAGGTTCAGCGGCAGTGGATCTGGGACAGAATTTACTCTCACCATCAGCAGCCTGCAGCCTGATGATTTTGC
AACTTATTACTGCCAACAGGGTTATAGTTGGGGTAATGTTGATAATGTTTTCGGCTGCGGGACCAAGGTGGAGATCA
AAGGTGGTGGCGGCTCTGGAGGAGGAGGGTCCGGACGGTCGCTGGTGGAGTCTGGGGGAGGCTTGGTCCAGCCTGGG
GGGTCCCTGAGACTCTCCTGTACTGCCTCTGGATTCACCATCAGTAGCTACCACATGCAGTGGGTCCGGCAGGCACC
TGGGAAGTGCCTGGAGTACATCGGAACCATTAGTAGTGGTGGTAATGTATACTACGCAAGCTCCGCTAGAGGCAGAT
TCACCATCTCCAGACCCTCGTCCAAGAACACGGTGGATCTTCAAATGAACAGCCTGAGAGCCGAGGACACGGCTGTG
TATTACTGTGCGAGAGACTCTGGTTATAGTGATCCTATGTGGGGCCAGGGAACCCTGGTCACCGTCTCTTCAGGCGG
TGGCGGTAGTGGGGGAGGCGGTTCTGGCGGCGGAGGGTCCGGCGGTGGAGGATCAGACGTTGTGATGACCCAGTCTC
CATCTTCCGTGTCTGCATCTGTAGGAGACAGAGTCACCATCACCTGTCAGGCCAGTCAGAACATTAGGACTTACTTA
TCCTGGTATCAGCAGAAACCAGGGAAAGCCCCTAAGCTCCTGATCTATGCTGCAGCCAATCTGGCATCTGGGGTCCC
ATCAAGGTTCAGCGGCAGTGGATCTGGGACAGATTTCACTCTCACCATCAGCGACTTGGAACCTGGCGATGCTGCAA
CTTACTATTGTCAGTCTACCTATCTTGGTACTGATTATGTTGGCGGTGCTTTCGGCTGTGGGACCAAGGTGGAGATC
AAATGA
>SEQ ID 162 SI-55E10 chain A aa
DVVMTQSPSTLSASVGDRVTINCQASESISSWLAWYQQKPGKAPKLLIYEASKLASGVPSRFSGSGSGTEFTLTISS
LQPDDFATYYCQGYFYFISRTYVNSFGCGTKVEIKGGGGSGGGGSGGGGSGGGGSEVQLVESGGGLVQPGGSLRLSC
AASGFTISTNAMSWVRQAPGKCLEWIGVITGRDITYYASWAKGRFTISRDNSKNTLYLQMNSLRAEDTAVYYCARDG
GSSAITSNNIWGQGTLVTVSTGGGGSGGGGSQVQLQQSGAEVKKPGSSVKVSCKASGYTFTNYYIYWVRQAPGQGLE
WIGGINPTSGGSNFNEKFKTRVTITADESSTTAYMELSSLRSEDTAFYFCTRQGLWFDSDGRGFDFWGQGTTVTVSS
ASTKGPSVFPLAPSSKSTSGGTAALGCLVKDYFPEPVTVSWNSGALTSGVHTFPAVLQSSGLYSLSSVVTVPSSSLG
TQTYICNVNHKPSNTKVDKRVEPKSCDKTHTCPPCPAPEAAGGPSVFLFPPKPKDTLMISRTPEVTCVVVDVSHEDP
EVKFNWYVDGVEVHNAKTKPREEQYASTYRVVSVLTVLHQDWLNGKEYKCAVSNKALPAPIEKTISKAKGQPREPQV
YTLPPSRDELTKNQVSLTCLVKGFYPSDIAVEWESNGQPENNYKTTPPVLDSDGSFFLYSKLTVDKSRWQQGNVFSC
SVMHEALHNHYTQKSLSLSPGGGGGSGGGGSEVQLLESGGGLVQPGGSLRLSCAASGFSFSSGYDMCWVRQAPGKCL
EWIACIAAGSAGITYDANWAKGRFTISRDNSKNTLYLQMNSLRAEDTAVYYCARSAFSFDYAMDLWGQGTLVTVSSG
GGGSGGGGSGGGGSGGGGSDIQMTQSPSTLSASVGDRVTITCQASQSISSHLNWYQQKPGKAPKLLIYKASTLASGV
PSRFSGSGSGTEFTLTISSLQPDDFATYYCQQGYSWGNVDNVFGCGTKVEIKGGGGSGGGGSGRSLVESGGGLVQPG
GSLRLSCTASGFTISSYHMQWVRQAPGKCLEYIGTISSGGNVYYASSARGRFTISRPSSKNTVDLQMNSLRAEDTAV
YYCARDSGYSDPMWGQGTLVTVSSGGGGSGGGGSGGGGSGGGGSDVVMTQSPSSVSASVGDRVTITCQASQNIRTYL
SWYQQKPGKAPKLLIYAAANLASGVPSRFSGSGSGTDFTLTISDLEPGDAATYYCQSTYLGTDYVGGAFGCGTKVEI
K
>SEQ ID 163 SI-56E1 chain A nt
GACGTCGTGATGACCCAGTCTCCTTCCACCCTGTCTGCATCTGTAGGAGACAGAGTCACCATCAATTGCCAAGCCAG
TGAGAGCATTAGCAGTTGGTTAGCCTGGTATCAGCAGAAACCAGGGAAAGCCCCTAAGCTCCTGATCTATGAAGCAT
CCAAACTGGCATCTGGGGTCCCATCAAGGTTCAGCGGCAGTGGATCTGGGACAGAATTTACTCTCACCATCAGCAGC
CTGCAGCCTGATGATTTTGCAACTTATTACTGCCAAGGCTATTTTTATTTTATTAGTCGTACTTATGTAAATTCTTT
CGGCGGAGGGACCAAGGTGGAGATCAAAGGCGGTGGCGGTAGTGGGGGAGGCGGTTCTGGCGGCGGAGGGTCCGGCG
GTGGAGGATCAGAGGTGCAGCTGGTGGAGTCTGGGGGAGGCTTGGTCCAGCCTGGGGGGTCCCTGAGACTCTCCTGT
GCAGCCTCTGGATTCACCATCAGTACCAATGCAATGAGCTGGGTCCGCCAGGCTCCAGGGAAGGGGCTGGAGTGGAT
CGGAGTCATTACTGGTCGTGATATCACATACTACGCGAGCTGGGCGAAAGGCAGATTCACCATCTCCAGAGACAATT
CCAAGAACACGCTGTATCTTCAAATGAACAGCCTGAGAGCCGAGGACACGGCTGTGTATTACTGTGCGAGAGACGGT
GGTTCTTCTGCTATTACTAGTAACAACATTTGGGGCCAGGGAACCCTGGTCACCGTGTCGACAGGCGGTGGAGGGTC
CGGCGGTGGTGGATCAGAGGTGCAATTGGTCCAGTCAGGAGCAGAGGTTAAGAAGCCTGGTGCTTCCGTCAAAGTTT
CGTGTAAGGCCAGCGGCTACAGGTTCACAAATTATTGGATTCATTGGGTCAGGCAGGCTCCGGGACAAGGCCTGGAA
TGGATCGGTGGCATTAATCCCGGGAATAACTACGCTACATATAGGAGAAAATTCCAGGGCAGAGTTACGATGACCGC
GGACACCTCCACAAGCACTGTCTACATGGAGCTGTCATCTCTGAGATCCGAGGACACCGCAGTGTACTATTGTACTA
GAGAAGGCTACGGTAATTACGGAGCCTGGTTCGCCTACTGGGGCCAGGGTACCCTAGTCACAGTCTCCTCAGCTAGC
ACCAAGGGCCCATCGGTCTTCCCCCTGGCACCCTCCTCCAAGAGCACCTCTGGGGGCACAGCGGCCCTGGGCTGCCT
GGTCAAGGACTACTTCCCCGAACCGGTGACGGTGTCGTGGAACTCAGGCGCCCTGACCAGCGGCGTGCACACCTTCC
CGGCTGTCCTACAGTCCTCAGGACTCTACTCCCTCAGCAGCGTGGTGACCGTGCCCTCCAGCAGCTTGGGCACCCAG
ACCTACATCTGCAACGTGAATCACAAGCCCAGCAACACCAAGGTGGACAAGAGAGTTGAGCCCAAATCTTGTGACAA
AACTCACACATGCCCACCGTGCCCAGCACCTGAAGCCGCGGGGGCACCGTCAGTCTTCCTCTTCCCCCCAAAACCCA
AGGACACCCTCATGATCTCCCGGACCCCTGAGGTCACATGCGTGGTGGTGGACGTGAGCCACGAAGACCCTGAGGTC
AAGTTCAACTGGTACGTGGACGGCGTGGAGGTGCATAATGCCAAGACAAAGCCGCGGGAGGAGCAGTACAACAGCAC
GTACCGTGTGGTCAGCGTCCTCACCGTCCTGCACCAGGACTGGCTGAATGGCAAGGAGTACAAGTGCGCGGTCTCCA
ACAAAGCCCTCCCAGCCCCCATCGAGAAAACCATCTCCAAAGCCAAAGGGCAGCCCCGAGAACCACAGGTGTACACC
CTGCCCCCATCCCGGGATGAGCTGACCAAGAACCAGGTCAGCCTGACCTGCCTGGTCAAAGGCTTCTATCCCAGCGA
CATCGCCGTGGAGTGGGAGAGCAATGGGCAGCCGGAGAACAACTACAAGACCACGCCTCCCGTGCTGGACTCCGACG
GCTCCTTCTTCCTCTATAGCAAGCTCACCGTGGACAAGAGCAGGTGGCAGCAGGGGAACGTCTTCTCATGCTCCGTG
ATGCATGAGGCTCTGCACAACCACTACACGCAGAAGAGCCTCTCCCTGTCTCCGGGTGGCGGTGGAGGGTCCGGCGG
TGGTGGATCCGAGGTGCAGCTGTTGGAGTCTGGGGGAGGCTTGGTACAGCCTGGGGGGTCCCTGAGACTCTCCTGTG
CAGCCTCTGGATTCTCCTTCAGTAGCGGGTACGACATGTGCTGGGTCCGCCAGGCTCCAGGGAAGGGGCTGGAGTGG
ATCGCATGCATTGCTGCTGGTAGTGCTGGTATCACTTACGACGCGAACTGGGCGAAAGGCCGGTTCACCATCTCCAG
AGACAATTCCAAGAACACGCTGTATCTGCAAATGAACAGCCTGAGAGCCGAGGACACGGCCGTATATTACTGTGCGA
GATCGGCGTTTTCGTTCGACTACGCCATGGACCTCTGGGGCCAGGGAACCCTGGTCACCGTCTCGAGCGGTGGAGGC
GGATCTGGCGGAGGTGGTTCCGGCGGTGGCGGCTCCGGTGGAGGCGGCTCTGACATCCAGATGACCCAGTCTCCTTC
CACCCTGTCTGCATCTGTAGGAGACAGAGTCACCATCACTTGCCAGGCCAGTCAGAGCATTAGTTCCCACTTAAACT
GGTATCAGCAGAAACCAGGGAAAGCCCCTAAGCTCCTGATCTATAAGGCATCCACTCTGGCATCTGGGGTCCCATCA
AGGTTCAGCGGCAGTGGATCTGGGACAGAATTTACTCTCACCATCAGCAGCCTGCAGCCTGATGATTTTGCAACTTA
TTACTGCCAACAGGGTTATAGTTGGGGTAATGTTGATAATGTTTTCGGCGGAGGGACCAAGGTGGAGATCAAAGGCG
GTGGAGGGTCCGGCGGTGGTGGCTCCGGACGGTCGCTGGTGGAGTCTGGGGGAGGCTTGGTCCAGCCTGGGGGGTCC
CTGAGACTCTCCTGTACTGCCTCTGGATTCACCATCAGTAGCTACCACATGCAGTGGGTCCGCCAGGCTCCAGGGAA
GGGGCTGGAGTACATCGGAACCATTAGTAGTGGTGGTAATGTATACTACGCAAGCTCCGCTAGAGGCAGATTCACCA
TCTCCAGACCCTCGTCCAAGAACACGGTGGATCTTCAAATGAACAGCCTGAGAGCCGAGGACACGGCTGTGTATTAC
TGTGCGAGAGACTCTGGTTATAGTGATCCTATGTGGGGCCAGGGAACCCTGGTCACCGTCTCTTCAGGCGGTGGCGG
TAGTGGGGGAGGCGGTTCTGGCGGCGGAGGGTCCGGCGGTGGAGGATCAGACGTTGTGATGACCCAGTCTCCATCTT
CCGTGTCTGCATCTGTAGGAGACAGAGTCACCATCACCTGTCAGGCCAGTCAGAACATTAGGACTTACTTATCCTGG
TATCAGCAGAAACCAGGGAAAGCCCCTAAGCTCCTGATCTATGCTGCAGCCAATCTGGCATCTGGGGTCCCATCAAG
GTTCAGCGGCAGTGGATCTGGGACAGATTTCACTCTCACCATCAGCGACCTGGAGCCTGGCGATGCTGCAACTTACT
ATTGTCAGTCTACCTATCTTGGTACTGATTATGTTGGCGGTGCTTTCGGCGGAGGGACCAAGGTGGAGATCAAATGA
>SEQ ID 164 SI-56E1 chain A aa
DVVMTQSPSTLSASVGDRVTINCQASESISSWLAWYQQKPGKAPKLLIYEASKLASGVPSRFSGSGSGTEFTLTISS
LQPDDFATYYCQGYFYFISRTYVNSFGGGTKVEIKGGGGSGGGGSGGGGSGGGGSEVQLVESGGGLVQPGGSLRLSC
AASGFTISTNAMSWVRQAPGKGLEWIGVITGRDITYYASWAKGRFTISRDNSKNTLYLQMNSLRAEDTAVYYCARDG
GSSAITSNNIWGQGTLVTVSTGGGGSGGGGSEVQLVQSGAEVKKPGASVKVSCKASGYRFTNYWIHWVRQAPGQGLE
WIGGINPGNNYATYRRKFQGRVTMTADTSTSTVYMELSSLRSEDTAVYYCTREGYGNYGAWFAYWGQGTLVTVSSAS
TKGPSVFPLAPSSKSTSGGTAALGCLVKDYFPEPVTVSWNSGALTSGVHTFPAVLQSSGLYSLSSVVTVPSSSLGTQ
TYICNVNHKPSNTKVDKRVEPKSCDKTHTCPPCPAPEAAGAPSVFLFPPKPKDTLMISRTPEVTCVVVDVSHEDPEV
KFNWYVDGVEVHNAKTKPREEQYNSTYRVVSVLTVLHQDWLNGKEYKCAVSNKALPAPIEKTISKAKGQPREPQVYT
LPPSRDELTKNQVSLTCLVKGFYPSDIAVEWESNGQPENNYKTTPPVLDSDGSFFLYSKLTVDKSRWQQGNVFSCSV
MHEALHNHYTQKSLSLSPGGGGGSGGGGSEVQLLESGGGLVQPGGSLRLSCAASGFSFSSGYDMCWVRQAPGKGLEW
IACIAAGSAGITYDANWAKGRFTISRDNSKNTLYLQMNSLRAEDTAVYYCARSAFSFDYAMDLWGQGTLVTVSSGGG
GSGGGGSGGGGSGGGGSDIQMTQSPSTLSASVGDRVTITCQASQSISSHLNWYQQKPGKAPKLLIYKASTLASGVPS
RFSGSGSGTEFTLTISSLQPDDFATYYCQQGYSWGNVDNVFGGGTKVEIKGGGGSGGGGSGRSLVESGGGLVQPGGS
LRLSCTASGFTISSYHMQWVRQAPGKGLEYIGTISSGGNVYYASSARGRFTISRPSSKNTVDLQMNSLRAEDTAVYY
CARDSGYSDPMWGQGTLVTVSSGGGGSGGGGSGGGGSGGGGSDVVMTQSPSSVSASVGDRVTITCQASQNIRTYLSW
YQQKPGKAPKLLIYAAANLASGVPSRFSGSGSGTDFTLTISDLEPGDAATYYCQSTYLGTDYVGGAFGGGTKVEIK
>SEQ ID 165 SI-56E1 and SI-56E3 chain B nt
GACGTTCAAGTGACCCAGAGCCCATCCAGCCTGAGCGCATCTGTAGGAGACCGGGTCACCATCACTTGTAGATCCAG
TCAGAGTCTTGCAAACAGTTATGGGAACACCTTTTTGTCTTGGTATCTGCACAAACCAGGTAAAGCCCCACAATTGC
TCATCTACGGAATCTCTAACAGATTTAGTGGTGTACCAGACAGGTTCAGCGGTTCCGGAAGTGGTACTGATTTCACC
CTCACGATCTCGTCTCTCCAGCCAGAAGATTTCGCCACTTATTACTGTTTACAAGGTACACATCAGCCGTACACATT
CGGTCAGGGTACTAAAGTAGAAATCAAACGTACGGTGGCTGCACCATCTGTCTTCATCTTCCCGCCATCTGATGAGC
AGTTGAAATCTGGAACTGCCTCTGTTGTGTGCCTGCTGAATAACTTCTATCCCAGAGAGGCCAAAGTACAGTGGAAG
GTGGATAACGCCCTCCAATCGGGTAACTCCCAGGAGAGTGTCACAGAGCAGGACAGCAAGGACAGCACCTACAGCCT
CAGCAGCACCCTGACGCTGAGCAAAGCAGACTACGAGAAACACAAAGTCTACGCCTGCGAAGTCACCCATCAGGGCC
TGAGCTCGCCCGTCACAAAGAGCTTCAACAGGGGAGAGTGTTAG
>SEQ ID 166 SI-56E1 and SI-56E3 chain B aa
DVQVTQSPSSLSASVGDRVTITCRSSQSLANSYGNTFLSWYLHKPGKAPQLLIYGISNRFSGVPDRFSGSGSGTDFT
LTISSLQPEDFATYYCLQGTHQPYTFGQGTKVEIKRTVAAPSVFIFPPSDEQLKSGTASVVCLLNNFYPREAKVQWK
VDNALQSGNSQESVTEQDSKDSTYSLSSTLTLSKADYEKHKVYACEVTHQGLSSPVTKSFNRGEC
>SEQ ID 167 SI-56E3 chain A nt
GACGTCGTGATGACCCAGTCTCCTTCCACCCTGTCTGCATCTGTAGGAGACAGAGTCACCATCAATTGCCAAGCCAG
TGAGAGCATTAGCAGTTGGTTAGCCTGGTATCAGCAGAAACCAGGGAAAGCCCCTAAGCTCCTGATCTATGAAGCAT
CCAAACTGGCATCTGGGGTCCCATCAAGGTTCAGCGGCAGTGGATCTGGGACAGAATTTACTCTCACCATCAGCAGC
CTGCAGCCTGATGATTTTGCAACTTATTACTGCCAAGGCTATTTTTATTTTATTAGTCGTACTTATGTAAATTCTTT
CGGCTGTGGGACCAAGGTGGAGATCAAAGGTGGAGGCGGTTCAGGCGGAGGTGGAAGTGGTGGTGGCGGCTCTGGAG
GCGGCGGATCTGAGGTGCAGCTGGTGGAGTCTGGGGGAGGCTTGGTCCAGCCTGGGGGGTCCCTGAGACTCTCCTGT
GCAGCCTCTGGATTCACCATCAGTACCAATGCAATGAGCTGGGTCCGCCAGGCTCCAGGGAAGTGCCTGGAGTGGAT
CGGAGTCATTACTGGTCGTGATATCACATACTACGCGAGCTGGGCGAAAGGCAGATTCACCATCTCCAGAGACAATT
CCAAGAACACGCTGTATCTTCAAATGAACAGCCTGAGAGCCGAGGACACGGCTGTGTATTACTGTGCGAGAGACGGT
GGTTCTTCTGCTATTACTAGTAACAACATTTGGGGCCAGGGAACCCTGGTCACCGTGTCGACAGGCGGTGGAGGGTC
CGGCGGTGGTGGATCAGAGGTGCAATTGGTCCAGTCAGGAGCAGAGGTTAAGAAGCCTGGTGCTTCCGTCAAAGTTT
CGTGTAAGGCCAGCGGCTACAGGTTCACAAATTATTGGATTCATTGGGTCAGGCAGGCTCCGGGACAAGGCCTGGAA
TGGATCGGTGGCATTAATCCCGGGAATAACTACGCTACATATAGGAGAAAATTCCAGGGCAGAGTTACGATGACCGC
GGACACCTCCACAAGCACTGTCTACATGGAGCTGTCATCTCTGAGATCCGAGGACACCGCAGTGTACTATTGTACTA
GAGAAGGCTACGGTAATTACGGAGCCTGGTTCGCCTACTGGGGCCAGGGTACCCTAGTCACAGTCTCCTCAGCTAGC
ACCAAGGGCCCATCGGTCTTCCCCCTGGCACCCTCCTCCAAGAGCACCTCTGGGGGCACAGCGGCCCTGGGCTGCCT
GGTCAAGGACTACTTCCCCGAACCGGTGACGGTGTCGTGGAACTCAGGCGCCCTGACCAGCGGCGTGCACACCTTCC
CGGCTGTCCTACAGTCCTCAGGACTCTACTCCCTCAGCAGCGTGGTGACCGTGCCCTCCAGCAGCTTGGGCACCCAG
ACCTACATCTGCAACGTGAATCACAAGCCCAGCAACACCAAGGTGGACAAGAGAGTTGAGCCCAAATCTTGTGACAA
AACTCACACATGCCCACCGTGCCCAGCACCTGAAGCCGCGGGGGGACCGTCAGTCTTCCTCTTCCCCCCAAAACCCA
AGGACACCCTCATGATCTCCCGGACCCCTGAGGTCACATGCGTGGTGGTGGACGTGAGCCACGAAGACCCTGAGGTC
AAGTTCAACTGGTACGTGGACGGCGTGGAGGTGCATAATGCCAAGACAAAGCCGCGGGAGGAGCAGTACGCCAGCAC
GTACCGTGTGGTCAGCGTCCTCACCGTCCTGCACCAGGACTGGCTGAATGGCAAGGAGTACAAGTGCGCGGTCTCCA
ACAAAGCCCTCCCAGCCCCCATCGAGAAAACCATCTCCAAAGCCAAAGGGCAGCCCCGAGAACCACAGGTGTACACC
CTGCCCCCATCCCGGGATGAGCTGACCAAGAACCAGGTCAGCCTGACCTGCCTGGTCAAAGGCTTCTATCCCAGCGA
CATCGCCGTGGAGTGGGAGAGCAATGGGCAGCCGGAGAACAACTACAAGACCACGCCTCCCGTGCTGGACTCCGACG
GCTCCTTCTTCCTCTATAGCAAGCTCACCGTGGACAAGAGCAGGTGGCAGCAGGGGAACGTCTTCTCATGCTCCGTG
ATGCATGAGGCTCTGCACAACCACTACACGCAGAAGAGCCTCTCCCTGTCTCCGGGTGGCGGTGGAGGGTCCGGCGG
TGGTGGATCCGAGGTGCAGCTGTTGGAGTCTGGGGGAGGCTTGGTACAGCCTGGGGGGTCCCTGAGACTCTCCTGTG
CAGCCTCTGGATTCTCCTTCAGTAGCGGGTACGACATGTGCTGGGTCCGCCAGGCTCCAGGGAAGTGCCTGGAGTGG
ATCGCATGCATTGCTGCTGGTAGTGCTGGTATCACTTACGACGCGAACTGGGCGAAAGGCCGGTTCACCATCTCCAG
AGACAATTCCAAGAACACGCTGTATCTGCAAATGAACAGCCTGAGAGCCGAGGACACGGCCGTATATTACTGTGCGA
GATCGGCGTTTTCGTTCGACTACGCCATGGACCTCTGGGGCCAGGGAACCCTGGTCACCGTCTCGAGCGGTGGAGGC
GGTTCAGGCGGAGGTGGAAGTGGTGGTGGCGGCTCTGGAGGCGGCGGATCTGACATCCAGATGACCCAGTCTCCTTC
CACCCTGTCTGCATCTGTAGGAGACAGAGTCACCATCACTTGCCAGGCCAGTCAGAGCATTAGTTCCCACTTAAACT
GGTATCAGCAGAAACCAGGGAAAGCCCCTAAGCTCCTGATCTATAAGGCATCCACTCTGGCATCTGGGGTCCCATCA
AGGTTCAGCGGCAGTGGATCTGGGACAGAATTTACTCTCACCATCAGCAGCCTGCAGCCTGATGATTTTGCAACTTA
TTACTGCCAACAGGGTTATAGTTGGGGTAATGTTGATAATGTTTTCGGCTGCGGGACCAAGGTGGAGATCAAAGGTG
GTGGCGGCTCTGGAGGAGGAGGGTCCGGACGGTCGCTGGTGGAGTCTGGGGGAGGCTTGGTCCAGCCTGGGGGGTCC
CTGAGACTCTCCTGTACTGCCTCTGGATTCACCATCAGTAGCTACCACATGCAGTGGGTCCGGCAGGCACCTGGGAA
GTGCCTGGAGTACATCGGAACCATTAGTAGTGGTGGTAATGTATACTACGCAAGCTCCGCTAGAGGCAGATTCACCA
TCTCCAGACCCTCGTCCAAGAACACGGTGGATCTTCAAATGAACAGCCTGAGAGCCGAGGACACGGCTGTGTATTAC
TGTGCGAGAGACTCTGGTTATAGTGATCCTATGTGGGGCCAGGGAACCCTGGTCACCGTCTCTTCAGGCGGTGGCGG
TAGTGGGGGAGGCGGTTCTGGCGGCGGAGGGTCCGGCGGTGGAGGATCAGACGTTGTGATGACCCAGTCTCCATCTT
CCGTGTCTGCATCTGTAGGAGACAGAGTCACCATCACCTGTCAGGCCAGTCAGAACATTAGGACTTACTTATCCTGG
TATCAGCAGAAACCAGGGAAAGCCCCTAAGCTCCTGATCTATGCTGCAGCCAATCTGGCATCTGGGGTCCCATCAAG
GTTCAGCGGCAGTGGATCTGGGACAGATTTCACTCTCACCATCAGCGACTTGGAACCTGGCGATGCTGCAACTTACT
ATTGTCAGTCTACCTATCTTGGTACTGATTATGTTGGCGGTGCTTTCGGCTGTGGGACCAAGGTGGAGATCAAATGA
>SEQ ID 168 SI-56E3 chain A aa
DVVMTQSPSTLSASVGDRVTINCQASESISSWLAWYQQKPGKAPKLLIYEASKLASGVPSRFSGSGSGTEFTLTISS
LQPDDFATYYCQGYFYFISRTYVNSFGCGTKVEIKGGGGSGGGGSGGGGSGGGGSEVQLVESGGGLVQPGGSLRLSC
AASGFTISTNAMSWVRQAPGKCLEWIGVITGRDITYYASWAKGRFTISRDNSKNTLYLQMNSLRAEDTAVYYCARDG
GSSAITSNNIWGQGTLVTVSTGGGGSGGGGSEVQLVQSGAEVKKPGASVKVSCKASGYRFTNYWIHWVRQAPGQGLE
WIGGINPGNNYATYRRKFQGRVTMTADTSTSTVYMELSSLRSEDTAVYYCTREGYGNYGAWFAYWGQGTLVTVSSAS
TKGPSVFPLAPSSKSTSGGTAALGCLVKDYFPEPVTVSWNSGALTSGVHTFPAVLQSSGLYSLSSVVTVPSSSLGTQ
TYICNVNHKPSNTKVDKRVEPKSCDKTHTCPPCPAPEAAGGPSVFLFPPKPKDTLMISRTPEVTCVVVDVSHEDPEV
KFNWYVDGVEVHNAKTKPREEQYASTYRVVSVLTVLHQDWLNGKEYKCAVSNKALPAPIEKTISKAKGQPREPQVYT
LPPSRDELTKNQVSLTCLVKGFYPSDIAVEWESNGQPENNYKTTPPVLDSDGSFFLYSKLTVDKSRWQQGNVFSCSV
MHEALHNHYTQKSLSLSPGGGGGSGGGGSEVQLLESGGGLVQPGGSLRLSCAASGFSFSSGYDMCWVRQAPGKCLEW
IACIAAGSAGITYDANWAKGRFTISRDNSKNTLYLQMNSLRAEDTAVYYCARSAFSFDYAMDLWGQGTLVTVSSGGG
GSGGGGSGGGGSGGGGSDIQMTQSPSTLSASVGDRVTITCQASQSISSHLNWYQQKPGKAPKLLIYKASTLASGVPS
RFSGSGSGTEFTLTISSLQPDDFATYYCQQGYSWGNVDNVFGCGTKVEIKGGGGSGGGGSGRSLVESGGGLVQPGGS
LRLSCTASGFTISSYHMQWVRQAPGKCLEYIGTISSGGNVYYASSARGRFTISRPSSKNTVDLQMNSLRAEDTAVYY
CARDSGYSDPMWGQGTLVTVSSGGGGSGGGGSGGGGSGGGGSDVVMTQSPSSVSASVGDRVTITCQASQNIRTYLSW
YQQKPGKAPKLLIYAAANLASGVPSRFSGSGSGTDFTLTISDLEPGDAATYYCQSTYLGTDYVGGAFGCGTKVEIK
>SEQ ID 169 SI-57E1 chain A nt
GACGTCGTGATGACCCAGTCTCCTTCCACCCTGTCTGCATCTGTAGGAGACAGAGTCACCATCAATTGCCAAGCCAG
TGAGAGCATTAGCAGTTGGTTAGCCTGGTATCAGCAGAAACCAGGGAAAGCCCCTAAGCTCCTGATCTATGAAGCAT
CCAAACTGGCATCTGGGGTCCCATCAAGGTTCAGCGGCAGTGGATCTGGGACAGAATTTACTCTCACCATCAGCAGC
CTGCAGCCTGATGATTTTGCAACTTATTACTGCCAAGGCTATTTTTATTTTATTAGTCGTACTTATGTAAATTCTTT
CGGCGGAGGGACCAAGGTGGAGATCAAAGGCGGTGGCGGTAGTGGGGGAGGCGGTTCTGGCGGCGGAGGGTCCGGCG
GTGGAGGATCAGAGGTGCAGCTGGTGGAGTCTGGGGGAGGCTTGGTCCAGCCTGGGGGGTCCCTGAGACTCTCCTGT
GCAGCCTCTGGATTCACCATCAGTACCAATGCAATGAGCTGGGTCCGCCAGGCTCCAGGGAAGGGGCTGGAGTGGAT
CGGAGTCATTACTGGTCGTGATATCACATACTACGCGAGCTGGGCGAAAGGCAGATTCACCATCTCCAGAGACAATT
CCAAGAACACGCTGTATCTTCAAATGAACAGCCTGAGAGCCGAGGACACGGCTGTGTATTACTGTGCGAGAGACGGT
GGTTCTTCTGCTATTACTAGTAACAACATTTGGGGCCAGGGAACCCTGGTCACCGTGTCGACAGGCGGTGGAGGGTC
CGGCGGTGGTGGATCACAGATCCAGCTGCAGCAGTCTGGACCTGAGGTGGTGAAGCCTGGGGCTTCAGTGAAGATAT
CCTGCAAGGCTTCTGGCTACACCTTCACTGACTACTATATAACCTGGGTGAAGCAGAAGCCTGGACAGGGACTTGAG
TGGATTGGATGGATTTATCCTGGAAGCGGTAATACTAAGTACAATGAGAAGTTCAAGGGCAAGGCCACATTGACTGT
AGACACATCCTCCAGCACAGCCTTCATGCAGCTCAGCAGCCTGACATCTGAGGACACTGCTGTCTATTTCTGTGCGA
ACTATGGTAACTACTGGTTTGCTTACTGGGGCCAAGGGACTCAGGTCACTGTCTCTGCAGCTAGCACCAAGGGCCCA
TCGGTCTTCCCCCTGGCACCCTCCTCCAAGAGCACCTCTGGGGGCACAGCGGCCCTGGGCTGCCTGGTCAAGGACTA
CTTCCCCGAACCGGTGACGGTGTCGTGGAACTCAGGCGCCCTGACCAGCGGCGTGCACACCTTCCCGGCTGTCCTAC
AGTCCTCAGGACTCTACTCCCTCAGCAGCGTGGTGACCGTGCCCTCCAGCAGCTTGGGCACCCAGACCTACATCTGC
AACGTGAATCACAAGCCCAGCAACACCAAGGTGGACAAGAGAGTTGAGCCCAAATCTTGTGACAAAACTCACACATG
CCCACCGTGCCCAGCACCTGAAGCCGCGGGGGCACCGTCAGTCTTCCTCTTCCCCCCAAAACCCAAGGACACCCTCA
TGATCTCCCGGACCCCTGAGGTCACATGCGTGGTGGTGGACGTGAGCCACGAAGACCCTGAGGTCAAGTTCAACTGG
TACGTGGACGGCGTGGAGGTGCATAATGCCAAGACAAAGCCGCGGGAGGAGCAGTACAACAGCACGTACCGTGTGGT
CAGCGTCCTCACCGTCCTGCACCAGGACTGGCTGAATGGCAAGGAGTACAAGTGCGCGGTCTCCAACAAAGCCCTCC
CAGCCCCCATCGAGAAAACCATCTCCAAAGCCAAAGGGCAGCCCCGAGAACCACAGGTGTACACCCTGCCCCCATCC
CGGGATGAGCTGACCAAGAACCAGGTCAGCCTGACCTGCCTGGTCAAAGGCTTCTATCCCAGCGACATCGCCGTGGA
GTGGGAGAGCAATGGGCAGCCGGAGAACAACTACAAGACCACGCCTCCCGTGCTGGACTCCGACGGCTCCTTCTTCC
TCTATAGCAAGCTCACCGTGGACAAGAGCAGGTGGCAGCAGGGGAACGTCTTCTCATGCTCCGTGATGCATGAGGCT
CTGCACAACCACTACACGCAGAAGAGCCTCTCCCTGTCTCCGGGTGGCGGTGGAGGGTCCGGCGGTGGTGGATCCGA
GGTGCAGCTGTTGGAGTCTGGGGGAGGCTTGGTACAGCCTGGGGGGTCCCTGAGACTCTCCTGTGCAGCCTCTGGAT
TCTCCTTCAGTAGCGGGTACGACATGTGCTGGGTCCGCCAGGCTCCAGGGAAGGGGCTGGAGTGGATCGCATGCATT
GCTGCTGGTAGTGCTGGTATCACTTACGACGCGAACTGGGCGAAAGGCCGGTTCACCATCTCCAGAGACAATTCCAA
GAACACGCTGTATCTGCAAATGAACAGCCTGAGAGCCGAGGACACGGCCGTATATTACTGTGCGAGATCGGCGTTTT
CGTTCGACTACGCCATGGACCTCTGGGGCCAGGGAACCCTGGTCACCGTCTCGAGCGGTGGAGGCGGATCTGGCGGA
GGTGGTTCCGGCGGTGGCGGCTCCGGTGGAGGCGGCTCTGACATCCAGATGACCCAGTCTCCTTCCACCCTGTCTGC
ATCTGTAGGAGACAGAGTCACCATCACTTGCCAGGCCAGTCAGAGCATTAGTTCCCACTTAAACTGGTATCAGCAGA
AACCAGGGAAAGCCCCTAAGCTCCTGATCTATAAGGCATCCACTCTGGCATCTGGGGTCCCATCAAGGTTCAGCGGC
AGTGGATCTGGGACAGAATTTACTCTCACCATCAGCAGCCTGCAGCCTGATGATTTTGCAACTTATTACTGCCAACA
GGGTTATAGTTGGGGTAATGTTGATAATGTTTTCGGCGGAGGGACCAAGGTGGAGATCAAAGGCGGTGGAGGGTCCG
GCGGTGGTGGCTCCGGACGGTCGCTGGTGGAGTCTGGGGGAGGCTTGGTCCAGCCTGGGGGGTCCCTGAGACTCTCC
TGTACTGCCTCTGGATTCACCATCAGTAGCTACCACATGCAGTGGGTCCGCCAGGCTCCAGGGAAGGGGCTGGAGTA
CATCGGAACCATTAGTAGTGGTGGTAATGTATACTACGCAAGCTCCGCTAGAGGCAGATTCACCATCTCCAGACCCT
CGTCCAAGAACACGGTGGATCTTCAAATGAACAGCCTGAGAGCCGAGGACACGGCTGTGTATTACTGTGCGAGAGAC
TCTGGTTATAGTGATCCTATGTGGGGCCAGGGAACCCTGGTCACCGTCTCTTCAGGCGGTGGCGGTAGTGGGGGAGG
CGGTTCTGGCGGCGGAGGGTCCGGCGGTGGAGGATCAGACGTTGTGATGACCCAGTCTCCATCTTCCGTGTCTGCAT
CTGTAGGAGACAGAGTCACCATCACCTGTCAGGCCAGTCAGAACATTAGGACTTACTTATCCTGGTATCAGCAGAAA
CCAGGGAAAGCCCCTAAGCTCCTGATCTATGCTGCAGCCAATCTGGCATCTGGGGTCCCATCAAGGTTCAGCGGCAG
TGGATCTGGGACAGATTTCACTCTCACCATCAGCGACCTGGAGCCTGGCGATGCTGCAACTTACTATTGTCAGTCTA
CCTATCTTGGTACTGATTATGTTGGCGGTGCTTTCGGCGGAGGGACCAAGGTGGAGATCAAATGA
>SEQ ID 170 SI-57E1 chain A aa
DVVMTQSPSTLSASVGDRVTINCQASESISSWLAWYQQKPGKAPKLLIYEASKLASGVPSRFSGSGSGTEFTLTISS
LQPDDFATYYCQGYFYFISRTYVNSFGGGTKVEIKGGGGSGGGGSGGGGSGGGGSEVQLVESGGGLVQPGGSLRLSC
AASGETISTNAMSWVRQAPGKGLEWIGVITGRDITYYASWAKGRFTISRDNSKNTLYLQMNSLRAEDTAVYYCARDG
GSSAITSNNIWGQGTLVTVSTGGGGSGGGGSQIQLQQSGPEVVKPGASVKISCKASGYTFTDYYITWVKQKPGQGLE
WIGWIYPGSGNTKYNEKFKGKATLTVDTSSSTAFMQLSSLTSEDTAVYFCANYGNYWFAYWGQGTQVTVSAASTKGP
SVFPLAPSSKSTSGGTAALGCLVKDYFPEPVTVSWNSGALTSGVHTFPAVLQSSGLYSLSSVVTVPSSSLGTQTYIC
NVNHKPSNTKVDKRVEPKSCDKTHTCPPCPAPEAAGAPSVFLFPPKPKDTLMISRTPEVTCVVVDVSHEDPEVKFNW
YVDGVEVHNAKTKPREEQYNSTYRVVSVLTVLHQDWLNGKEYKCAVSNKALPAPIEKTISKAKGQPREPQVYTLPPS
RDELTKNQVSLTCLVKGFYPSDIAVEWESNGQPENNYKTTPPVLDSDGSFFLYSKLTVDKSRWQQGNVFSCSVMHEA
LHNHYTQKSLSLSPGGGGGSGGGGSEVQLLESGGGLVQPGGSLRLSCAASGFSFSSGYDMCWVRQAPGKGLEWIACI
AAGSAGITYDANWAKGRFTISRDNSKNTLYLQMNSLRAEDTAVYYCARSAFSFDYAMDLWGQGTLVTVSSGGGGSGG
GGSGGGGSGGGGSDIQMTQSPSTLSASVGDRVTITCQASQSISSHLNWYQQKPGKAPKLLIYKASTLASGVPSRFSG
SGSGTEFTLTISSLQPDDFATYYCQQGYSWGNVDNVFGGGTKVEIKGGGGSGGGGSGRSLVESGGGLVQPGGSLRLS
CTASGFTISSYHMQWVRQAPGKGLEYIGTISSGGNVYYASSARGRFTISRPSSKNTVDLQMNSLRAEDTAVYYCARD
SGYSDPMWGQGTLVTVSSGGGGSGGGGSGGGGSGGGGSDVVMTQSPSSVSASVGDRVTITCQASQNIRTYLSWYQQK
PGKAPKLLIYAAANLASGVPSRFSGSGSGTDFTLTISDLEPGDAATYYCQSTYLGTDYVGGAFGGGTKVEIK
>SEQ ID 171 SI-57E1 and SI-57E3 chain B nt
GACATTGTGCTGACCCAATCTCCAGCTTCTTTGGCTGTGTCTCTAGGGCAGAGGGCCACCATCTCCTGCAAGGCCAG
CCAAAGTGTTGATTTTGATGGTGATAGTTATATGAACTGGTACCAACAGAAACCAGGACAGCCACCCAAAGTCCTCA
TCTATGCTGCATCCAATCTAGAATCTGGGATCCCAGCCAGGTTTAGTGGCAGTGGGTCTGGGACAGACTTCACCCTC
AACATCCATCCTGTGGAGGAGGAGGATGCTGCAACCTATTACTGTCAGCAAAGTAATGAGGATCCGTGGACGTTCGG
TGGAGGCACCAAGCTGGAAATCAAACGTACGGTGGCTGCACCATCTGTCTTCATCTTCCCGCCATCTGATGAGCAGT
TGAAATCTGGAACTGCCTCTGTTGTGTGCCTGCTGAATAACTTCTATCCCAGAGAGGCCAAAGTACAGTGGAAGGTG
GATAACGCCCTCCAATCGGGTAACTCCCAGGAGAGTGTCACAGAGCAGGACAGCAAGGACAGCACCTACAGCCTCAG
CAGCACCCTGACGCTGAGCAAAGCAGACTACGAGAAACACAAAGTCTACGCCTGCGAAGTCACCCATCAGGGCCTGA
GCTCGCCCGTCACAAAGAGCTTCAACAGGGGAGAGTGTTAG
>SEQ ID 172 SI-57E1 and SI-57E3 chain B aa
DIVLTQSPASLAVSLGQRATISCKASQSVDFDGDSYMNWYQQKPGQPPKVLIYAASNLESGIPARFSGSGSGTDFTL
NIHPVEEEDAATYYCQQSNEDPWTFGGGTKLEIKRTVAAPSVFIFPPSDEQLKSGTASVVCLLNNFYPREAKVQWKV
DNALQSGNSQESVTEQDSKDSTYSLSSTLTLSKADYEKHKVYACEVTHQGLSSPVTKSFNRGEC
>SEQ ID 173 SI-57E3 chain A nt
GACGTCGTGATGACCCAGTCTCCTTCCACCCTGTCTGCATCTGTAGGAGACAGAGTCACCATCAATTGCCAAGCCAG
TGAGAGCATTAGCAGTTGGTTAGCCTGGTATCAGCAGAAACCAGGGAAAGCCCCTAAGCTCCTGATCTATGAAGCAT
CCAAACTGGCATCTGGGGTCCCATCAAGGTTCAGCGGCAGTGGATCTGGGACAGAATTTACTCTCACCATCAGCAGC
CTGCAGCCTGATGATTTTGCAACTTATTACTGCCAAGGCTATTTTTATTTTATTAGTCGTACTTATGTAAATTCTTT
CGGCTGTGGGACCAAGGTGGAGATCAAAGGTGGAGGCGGTTCAGGCGGAGGTGGAAGTGGTGGTGGCGGCTCTGGAG
GCGGCGGATCTGAGGTGCAGCTGGTGGAGTCTGGGGGAGGCTTGGTCCAGCCTGGGGGGTCCCTGAGACTCTCCTGT
GCAGCCTCTGGATTCACCATCAGTACCAATGCAATGAGCTGGGTCCGCCAGGCTCCAGGGAAGTGCCTGGAGTGGAT
CGGAGTCATTACTGGTCGTGATATCACATACTACGCGAGCTGGGCGAAAGGCAGATTCACCATCTCCAGAGACAATT
CCAAGAACACGCTGTATCTTCAAATGAACAGCCTGAGAGCCGAGGACACGGCTGTGTATTACTGTGCGAGAGACGGT
GGTTCTTCTGCTATTACTAGTAACAACATTTGGGGCCAGGGAACCCTGGTCACCGTGTCGACAGGCGGTGGAGGGTC
CGGCGGTGGTGGATCACAGATCCAGCTGCAGCAGTCTGGACCTGAGGTGGTGAAGCCTGGGGCTTCAGTGAAGATAT
CCTGCAAGGCTTCTGGCTACACCTTCACTGACTACTATATAACCTGGGTGAAGCAGAAGCCTGGACAGGGACTTGAG
TGGATTGGATGGATTTATCCTGGAAGCGGTAATACTAAGTACAATGAGAAGTTCAAGGGCAAGGCCACATTGACTGT
AGACACATCCTCCAGCACAGCCTTCATGCAGCTCAGCAGCCTGACATCTGAGGACACTGCTGTCTATTTCTGTGCGA
ACTATGGTAACTACTGGTTTGCTTACTGGGGCCAAGGGACTCAGGTCACTGTCTCTGCAGCTAGCACCAAGGGCCCA
TCGGTCTTCCCCCTGGCACCCTCCTCCAAGAGCACCTCTGGGGGCACAGCGGCCCTGGGCTGCCTGGTCAAGGACTA
CTTCCCCGAACCGGTGACGGTGTCGTGGAACTCAGGCGCCCTGACCAGCGGCGTGCACACCTTCCCGGCTGTCCTAC
AGTCCTCAGGACTCTACTCCCTCAGCAGCGTGGTGACCGTGCCCTCCAGCAGCTTGGGCACCCAGACCTACATCTGC
AACGTGAATCACAAGCCCAGCAACACCAAGGTGGACAAGAGAGTTGAGCCCAAATCTTGTGACAAAACTCACACATG
CCCACCGTGCCCAGCACCTGAAGCCGCGGGGGGACCGTCAGTCTTCCTCTTCCCCCCAAAACCCAAGGACACCCTCA
TGATCTCCCGGACCCCTGAGGTCACATGCGTGGTGGTGGACGTGAGCCACGAAGACCCTGAGGTCAAGTTCAACTGG
TACGTGGACGGCGTGGAGGTGCATAATGCCAAGACAAAGCCGCGGGAGGAGCAGTACGCCAGCACGTACCGTGTGGT
CAGCGTCCTCACCGTCCTGCACCAGGACTGGCTGAATGGCAAGGAGTACAAGTGCGCGGTCTCCAACAAAGCCCTCC
CAGCCCCCATCGAGAAAACCATCTCCAAAGCCAAAGGGCAGCCCCGAGAACCACAGGTGTACACCCTGCCCCCATCC
CGGGATGAGCTGACCAAGAACCAGGTCAGCCTGACCTGCCTGGTCAAAGGCTTCTATCCCAGCGACATCGCCGTGGA
GTGGGAGAGCAATGGGCAGCCGGAGAACAACTACAAGACCACGCCTCCCGTGCTGGACTCCGACGGCTCCTTCTTCC
TCTATAGCAAGCTCACCGTGGACAAGAGCAGGTGGCAGCAGGGGAACGTCTTCTCATGCTCCGTGATGCATGAGGCT
CTGCACAACCACTACACGCAGAAGAGCCTCTCCCTGTCTCCGGGTGGCGGTGGAGGGTCCGGCGGTGGTGGATCCGA
GGTGCAGCTGTTGGAGTCTGGGGGAGGCTTGGTACAGCCTGGGGGGTCCCTGAGACTCTCCTGTGCAGCCTCTGGAT
TCTCCTTCAGTAGCGGGTACGACATGTGCTGGGTCCGCCAGGCTCCAGGGAAGTGCCTGGAGTGGATCGCATGCATT
GCTGCTGGTAGTGCTGGTATCACTTACGACGCGAACTGGGCGAAAGGCCGGTTCACCATCTCCAGAGACAATTCCAA
GAACACGCTGTATCTGCAAATGAACAGCCTGAGAGCCGAGGACACGGCCGTATATTACTGTGCGAGATCGGCGTTTT
CGTTCGACTACGCCATGGACCTCTGGGGCCAGGGAACCCTGGTCACCGTCTCGAGCGGTGGAGGCGGTTCAGGCGGA
GGTGGAAGTGGTGGTGGCGGCTCTGGAGGCGGCGGATCTGACATCCAGATGACCCAGTCTCCTTCCACCCTGTCTGC
ATCTGTAGGAGACAGAGTCACCATCACTTGCCAGGCCAGTCAGAGCATTAGTTCCCACTTAAACTGGTATCAGCAGA
AACCAGGGAAAGCCCCTAAGCTCCTGATCTATAAGGCATCCACTCTGGCATCTGGGGTCCCATCAAGGTTCAGCGGC
AGTGGATCTGGGACAGAATTTACTCTCACCATCAGCAGCCTGCAGCCTGATGATTTTGCAACTTATTACTGCCAACA
GGGTTATAGTTGGGGTAATGTTGATAATGTTTTCGGCTGCGGGACCAAGGTGGAGATCAAAGGTGGTGGCGGCTCTG
GAGGAGGAGGGTCCGGACGGTCGCTGGTGGAGTCTGGGGGAGGCTTGGTCCAGCCTGGGGGGTCCCTGAGACTCTCC
TGTACTGCCTCTGGATTCACCATCAGTAGCTACCACATGCAGTGGGTCCGGCAGGCACCTGGGAAGTGCCTGGAGTA
CATCGGAACCATTAGTAGTGGTGGTAATGTATACTACGCAAGCTCCGCTAGAGGCAGATTCACCATCTCCAGACCCT
CGTCCAAGAACACGGTGGATCTTCAAATGAACAGCCTGAGAGCCGAGGACACGGCTGTGTATTACTGTGCGAGAGAC
TCTGGTTATAGTGATCCTATGTGGGGCCAGGGAACCCTGGTCACCGTCTCTTCAGGCGGTGGCGGTAGTGGGGGAGG
CGGTTCTGGCGGCGGAGGGTCCGGCGGTGGAGGATCAGACGTTGTGATGACCCAGTCTCCATCTTCCGTGTCTGCAT
CTGTAGGAGACAGAGTCACCATCACCTGTCAGGCCAGTCAGAACATTAGGACTTACTTATCCTGGTATCAGCAGAAA
CCAGGGAAAGCCCCTAAGCTCCTGATCTATGCTGCAGCCAATCTGGCATCTGGGGTCCCATCAAGGTTCAGCGGCAG
TGGATCTGGGACAGATTTCACTCTCACCATCAGCGACTTGGAACCTGGCGATGCTGCAACTTACTATTGTCAGTCTA
CCTATCTTGGTACTGATTATGTTGGCGGTGCTTTCGGCTGTGGGACCAAGGTGGAGATCAAATGA
>SEQ ID 174 SI-57E3 chain A aa
DVVMTQSPSTLSASVGDRVTINCQASESISSWLAWYQQKPGKAPKLLIYEASKLASGVPSRFSGSGSGTEFTLTISS
LQPDDFATYYCQGYFYFISRTYVNSFGCGTKVEIKGGGGSGGGGSGGGGSGGGGSEVQLVESGGGLVQPGGSLRLSC
AASGFTISTNAMSWVRQAPGKCLEWIGVITGRDITYYASWAKGRFTISRDNSKNTLYLQMNSLRAEDTAVYYCARDG
GSSAITSNNIWGQGTLVTVSTGGGGSGGGGSQIQLQQSGPEVVKPGASVKISCKASGYTFTDYYITWVKQKPGQGLE
WIGWIYPGSGNTKYNEKFKGKATLTVDTSSSTAFMQLSSLTSEDTAVYFCANYGNYWFAYWGQGTQVTVSAASTKGP
SVFPLAPSSKSTSGGTAALGCLVKDYFPEPVTVSWNSGALTSGVHTFPAVLQSSGLYSLSSVVTVPSSSLGTQTYIC
NVNHKPSNTKVDKRVEPKSCDKTHTCPPCPAPEAAGGPSVFLFPPKPKDTLMISRTPEVTCVVVDVSHEDPEVKFNW
YVDGVEVHNAKTKPREEQYASTYRVVSVLTVLHQDWLNGKEYKCAVSNKALPAPIEKTISKAKGQPREPQVYTLPPS
RDELTKNQVSLTCLVKGFYPSDIAVEWESNGQPENNYKTTPPVLDSDGSFFLYSKLTVDKSRWQQGNVFSCSVMHEA
LHNHYTQKSLSLSPGGGGGSGGGGSEVQLLESGGGLVQPGGSLRLSCAASGFSFSSGYDMCWVRQAPGKCLEWIACI
AAGSAGITYDANWAKGRFTISRDNSKNTLYLQMNSLRAEDTAVYYCARSAFSFDYAMDLWGQGTLVTVSSGGGGSGG
GGSGGGGSGGGGSDIQMTQSPSTLSASVGDRVTITCQASQSISSHLNWYQQKPGKAPKLLIYKASTLASGVPSRFSG
SGSGTEFTLTISSLQPDDFATYYCQQGYSWGNVDNVFGCGTKVEIKGGGGSGGGGSGRSLVESGGGLVQPGGSLRLS
CTASGFTISSYHMQWVRQAPGKCLEYIGTISSGGNVYYASSARGRFTISRPSSKNTVDLQMNSLRAEDTAVYYCARD
SGYSDPMWGQGTLVTVSSGGGGSGGGGSGGGGSGGGGSDVVMTQSPSSVSASVGDRVTITCQASQNIRTYLSWYQQK
PGKAPKLLIYAAANLASGVPSRFSGSGSGTDFTLTISDLEPGDAATYYCQSTYLGTDYVGGAFGCGTKVEIK
>SEQ ID 175 SI-1H1 chain A nt
GACATCCAGATGACCCAGTCTCCATCCTCCCTGTCTGCATCTGTAGGAGACAGAGTCACCATCACTTGCCAGGCGAG
TCAGGACATCAGCAACTATTTAAATTGGTATCAGCAGAAACCAGGGAAAGCCCCTAAACTCCTGATCTACGATGCAT
CCAATTTGGAAACAGGGGTCCCATCAAGGTTCAGTGGAAGTGGATCTGGGACAGATTTTACTTTCACCATCAGCAGC
CTGCAGCCTGAAGATATTGCAACATATTTCTGTCAACACTTTGATCATCTCCCGCTCGCTTTCGGCGGTGGGACCAA
GGTGGAAATTAAAGGCGGTGGAGGGTCCGGCGGTGGTGGATCACAGGTGCAGCTGCAGGAGTCGGGCCCAGGACTGG
TGAAGCCTTCGGAGACCCTGTCCCTCACCTGCACTGTCTCTGGTGGCTCCGTCAGCAGTGGTGATTACTACTGGACC
TGGATCCGGCAGTCCCCAGGGAAGGGACTGGAGTGGATTGGACACATCTATTACAGTGGGAACACCAATTATAACCC
CTCCCTCAAGAGCCGACTCACCATATCAATTGACACGTCCAAGACTCAGTTCTCCCTGAAGCTGAGTTCTGTGACCG
CTGCGGACACGGCCATTTATTACTGTGTGCGAGATCGAGTGACTGGTGCTTTTGATATCTGGGGCCAAGGGACAATG
GTCACCGTCTCGAGCGGTGGAGGCGGATCTGGCGGAGGTGGTTCCGGCGGTGGCGGCTCCGGTGGAGGCGGCTCTGA
GGTGCAGCTGGTGGAGTCTGGGGGAGGCTTGGTCCAGCCTGGGGGGTCCCTGAGACTCTCCTGTGCAGCCTCTGGAT
TCACCATCAGTACCAATGCAATGAGCTGGGTCCGCCAGGCTCCAGGGAAGGGGCTGGAGTGGATCGGAGTCATTACT
GGTCGTGATATCACATACTACGCGAGCTGGGCGAAAGGCAGATTCACCATCTCCAGAGACAATTCCAAGAACACGCT
GTATCTTCAAATGAACAGCCTGAGAGCCGAGGACACGGCTGTGTATTACTGTGCGAGAGACGGTGGTTCTTCTGCTA
TTACTAGTAACAACATTTGGGGCCAGGGAACCCTGGTCACCGTGTCCTCAGCTAGCACCAAGGGCCCATCGGTCTTC
CCCCTGGCACCCTCCTCCAAGAGCACCTCTGGGGGCACAGCGGCCCTGGGCTGCCTGGTCAAGGACTACTTCCCCGA
ACCGGTGACGGTGTCGTGGAACTCAGGCGCCCTGACCAGCGGCGTGCACACCTTCCCGGCTGTCCTACAGTCCTCAG
GACTCTACTCCCTCAGCAGCGTGGTGACCGTGCCCTCCAGCAGCTTGGGCACCCAGACCTACATCTGCAACGTGAAT
CACAAGCCCAGCAACACCAAGGTGGACAAGAGAGTTGAGCCCAAATCTTGTGACAAAACTCACACATGCCCACCGTG
CCCAGCACCTGAAGCCGCGGGGGGACCGTCAGTCTTCCTCTTCCCCCCAAAACCCAAGGACACCCTCATGATCTCCC
GGACCCCTGAGGTCACATGCGTGGTGGTGGACGTGAGCCACGAAGACCCTGAGGTCAAGTTCAACTGGTACGTGGAC
GGCGTGGAGGTGCATAATGCCAAGACAAAGCCGCGGGAGGAGCAGTACAACAGCACGTACCGTGTGGTCAGCGTCCT
CACCGTCCTGCACCAGGACTGGCTGAATGGCAAGGAGTACAAGTGCGCGGTCTCCAACAAAGCCCTCCCAGCCCCCA
TCGAGAAAACCATCTCCAAAGCCAAAGGGCAGCCCCGAGAACCACAGGTGTACACCCTGCCCCCATCCCGGGATGAG
CTGACCAAGAACCAGGTCAGCCTGACCTGCCTGGTCAAAGGCTTCTATCCCAGCGACATCGCCGTGGAGTGGGAGAG
CAATGGGCAGCCGGAGAACAACTACAAGACCACGCCTCCCGTGCTGGACTCCGACGGCTCCTTCTTCCTCTATAGCA
AGCTCACCGTGGACAAGAGCAGGTGGCAGCAGGGGAACGTCTTCTCATGCTCCGTGATGCATGAGGCTCTGCACAAC
CACTACACGCAGAAGAGCCTCTCCCTGTCTCCGGGTGGCGGTGGAGGGTCCGGCGGTGGTGGATCCGAGGTGCAGCT
GTTGGAGTCTGGGGGAGGCTTGGTACAGCCTGGGGGGTCCCTGAGACTCTCCTGTGCAGCCTCTGGATTCTCCTTCA
GTAGCGGGTACGACATGTGCTGGGTCCGCCAGGCTCCAGGGAAGGGGCTGGAGTGGATCGCATGCATTGCTGCTGGT
AGTGCTGGTATCACTTACGACGCGAACTGGGCGAAAGGCCGGTTCACCATCTCCAGAGACAATTCCAAGAACACGCT
GTATCTGCAAATGAACAGCCTGAGAGCCGAGGACACGGCCGTATATTACTGTGCGAGATCGGCGTTTTCGTTCGACT
ACGCCATGGACCTCTGGGGCCAGGGAACCCTGGTCACCGTCTCGAGCGGTGGAGGCGGATCTGGCGGAGGTGGTTCC
GGCGGTGGCGGCTCCGGTGGAGGCGGCTCTGACATCCAGATGACCCAGTCTCCTTCCACCCTGTCTGCATCTGTAGG
AGACAGAGTCACCATCACTTGCCAGGCCAGTCAGAGCATTAGTTCCCACTTAAACTGGTATCAGCAGAAACCAGGGA
AAGCCCCTAAGCTCCTGATCTATAAGGCATCCACTCTGGCATCTGGGGTCCCATCAAGGTTCAGCGGCAGTGGATCT
GGGACAGAATTTACTCTCACCATCAGCAGCCTGCAGCCTGATGATTTTGCAACTTATTACTGCCAACAGGGTTATAG
TTGGGGTAATGTTGATAATGTTTTCGGCGGAGGGACCAAGGTGGAGATCAAAGGCGGTGGAGGGTCCGGCGGTGGTG
GCTCCGGACGGTCGCTGGTGGAGTCTGGGGGAGGCTTGGTCCAGCCTGGGGGGTCCCTGAGACTCTCCTGTACTGCC
TCTGGATTCACCATCAGTAGCTACCACATGCAGTGGGTCCGCCAGGCTCCAGGGAAGGGGCTGGAGTACATCGGAAC
CATTAGTAGTGGTGGTAATGTATACTACGCAAGCTCCGCTAGAGGCAGATTCACCATCTCCAGACCCTCGTCCAAGA
ACACGGTGGATCTTCAAATGAACAGCCTGAGAGCCGAGGACACGGCTGTGTATTACTGTGCGAGAGACTCTGGTTAT
AGTGATCCTATGTGGGGCCAGGGAACCCTGGTCACCGTCTCTTCAGGCGGTGGCGGTAGTGGGGGAGGCGGTTCTGG
CGGCGGAGGGTCCGGCGGTGGAGGATCAGACGTTGTGATGACCCAGTCTCCATCTTCCGTGTCTGCATCTGTAGGAG
ACAGAGTCACCATCACCTGTCAGGCCAGTCAGAACATTAGGACTTACTTATCCTGGTATCAGCAGAAACCAGGGAAA
GCCCCTAAGCTCCTGATCTATGCTGCAGCCAATCTGGCATCTGGGGTCCCATCAAGGTTCAGCGGCAGTGGATCTGG
GACAGATTTCACTCTCACCATCAGCGACCTGGAGCCTGGCGATGCTGCAACTTACTATTGTCAGTCTACCTATCTTG
GTACTGATTATGTTGGCGGTGCTTTCGGCGGAGGGACCAAGGTGGAGATCAAATGA
>SEQ ID 176 SI-1H1 chain A aa
DIQMTQSPSSLSASVGDRVTITCQASQDISNYLNWYQQKPGKAPKLLIYDASNLETGVPSRFSGSGSGTDFTFTISS
LQPEDIATYFCQHFDHLPLAFGGGTKVEIKGGGGSGGGGSQVQLQESGPGLVKPSETLSLTCTVSGGSVSSGDYYWT
WIRQSPGKGLEWIGHIYYSGNTNYNPSLKSRLTISIDTSKTQFSLKLSSVTAADTAIYYCVRDRVTGAFDIWGQGTM
VTVSSGGGGSGGGGSGGGGSGGGGSEVQLVESGGGLVQPGGSLRLSCAASGFTISTNAMSWVRQAPGKGLEWIGVIT
GRDITYYASWAKGRFTISRDNSKNTLYLQMNSLRAEDTAVYYCARDGGSSAITSNNIWGQGTLVTVSSASTKGPSVF
PLAPSSKSTSGGTAALGCLVKDYFPEPVTVSWNSGALTSGVHTFPAVLQSSGLYSLSSVVTVPSSSLGTQTYICNVN
HKPSNTKVDKRVEPKSCDKTHTCPPCPAPEAAGGPSVFLFPPKPKDTLMISRTPEVTCVVVDVSHEDPEVKFNWYVD
GVEVHNAKTKPREEQYNSTYRVVSVLTVLHQDWLNGKEYKCAVSNKALPAPIEKTISKAKGQPREPQVYTLPPSRDE
LTKNQVSLTCLVKGFYPSDIAVEWESNGQPENNYKTTPPVLDSDGSFFLYSKLTVDKSRWQQGNVFSCSVMHEALHN
HYTQKSLSLSPGGGGGSGGGGSEVQLLESGGGLVQPGGSLRLSCAASGFSFSSGYDMCWVRQAPGKGLEWIACIAAG
SAGITYDANWAKGRFTISRDNSKNTLYLQMNSLRAEDTAVYYCARSAFSFDYAMDLWGQGTLVTVSSGGGGSGGGGS
GGGGSGGGGSDIQMTQSPSTLSASVGDRVTITCQASQSISSHLNWYQQKPGKAPKLLIYKASTLASGVPSRFSGSGS
GTEFTLTISSLQPDDFATYYCQQGYSWGNVDNVFGGGTKVEIKGGGGSGGGGSGRSLVESGGGLVQPGGSLRLSCTA
SGFTISSYHMQWVRQAPGKGLEYIGTISSGGNVYYASSARGRFTISRPSSKNTVDLQMNSLRAEDTAVYYCARDSGY
SDPMWGQGTLVTVSSGGGGSGGGGSGGGGSGGGGSDVVMTQSPSSVSASVGDRVTITCQASQNIRTYLSWYQQKPGK
APKLLIYAAANLASGVPSRFSGSGSGTDFTLTISDLEPGDAATYYCQSTYLGTDYVGGAFGGGTKVEIK
>SEQ ID 177 SI-1H1 chain B nt
CAGTCTGCCCTGACTCAGCCTGCCTCCGTGTCTGGGTCTCCTGGACAGTCGATCACCATCTCCTGCACTGGAACCAG
CAGTGACGTTGGTGGTTATAACTTTGTCTCCTGGTACCAACAACACCCAGGCAAAGCCCCCAAACTCATGATCTATG
ATGTCAGTGATCGGCCCTCAGGGGTGTCTGATCGCTTCTCCGGCTCCAAGTCTGGCAACACGGCCTCCCTGATCATC
TCTGGCCTCCAGGCTGACGACGAGGCTGATTATTACTGCAGCTCATATGGGAGCAGCAGCACTCATGTGATTTTCGG
CGGAGGGACCAAGGTGACCGTCCTAGGTGGAGGCGGTTCAGGCGGAGGTGGTTCCGGCGGTGGCGGCTCCGGTGGAG
GCGGCTCTCAGGTGCAATTGCAGGAGTCGGGGGGAGGCCTGGTCAAGCCTGGAGGGTCCCTGAGACTCTCCTGTGCA
GCCTCTGGATTCACCTTTAGTAGTTATTGGATGAGCTGGGTCCGCCAGGCTCCAGGGAAGGGGCTGGAGTGGGTGGC
CAACATAAACCGCGATGGAAGTGCGAGTTACTATGTGGACTCTGTGAAGGGCCGATTCACCATCTCCAGAGACGACG
CCAAGAACTCACTGTATCTGCAAATGAACAGCCTGAGAGCTGAGGACACGGCTGTGTATTACTGTGCGAGAGATCGT
GGGGTGGGCTACTTCGATCTCTGGGGCCGTGGCACCCTGGTCACCGTCTCGAGCGGCGGTGGAGGGTCCGGCGGTGG
TGGATCCGACGTCGTGATGACCCAGTCTCCTTCCACCCTGTCTGCATCTGTAGGAGACAGAGTCACCATCAATTGCC
AAGCCAGTGAGAGCATTAGCAGTTGGTTAGCCTGGTATCAGCAGAAACCAGGGAAAGCCCCTAAGCTCCTGATCTAT
GAAGCATCCAAACTGGCATCTGGGGTCCCATCAAGGTTCAGCGGCAGTGGATCTGGGACAGAATTTACTCTCACCAT
CAGCAGCCTGCAGCCTGATGATTTTGCAACTTATTACTGCCAAGGCTATTTTTATTTTATTAGTCGTACTTATGTAA
ATTCTTTCGGCGGAGGGACCAAGGTGGAGATCAAACGTACGGTGGCTGCACCATCTGTCTTCATCTTCCCGCCATCT
GATGAGCAGTTGAAATCTGGAACTGCCTCTGTTGTGTGCCTGCTGAATAACTTCTATCCCAGAGAGGCCAAAGTACA
GTGGAAGGTGGATAACGCCCTCCAATCGGGTAACTCCCAGGAGAGTGTCACAGAGCAGGACAGCAAGGACAGCACCT
ACAGCCTCAGCAGCACCCTGACGCTGAGCAAAGCAGACTACGAGAAACACAAAGTCTACGCCTGCGAAGTCACCCAT
CAGGGCCTGAGCTCGCCCGTCACAAAGAGCTTCAACAGGGGAGAGTGTGGCGGTGGAGGGTCCGGCGGTGGTGGATC
CCAGGTCACATTGAAGGAATCTGGCCCCGGCCTTGTTCAGCCAGGACAGACCCTTAGGCTCACCTGTGCCTTCAGTG
GTTTTTCTCTTAGCACTAGCGGTATGGGGGTCGGCTGGATTCGGCAGCCTCCCGGCAAAGGTCTTGAGTGGTTGGCT
CACATTTGGTGGGACGACGACAAACGGTATAATCCTGCCTTGAAAAGTCGGCTGACCATTAGTAAGGATACCTCAAA
AAATCAAGTGTACTTGCAAATGAATAGCCTTGACGCCGAGGATACGGCTGTATATTATTGCGCGCGGATGGAACTCT
GGTCTTACTACTTTGATTATTGGGGGCAGGGGACTCTCGTCACGGTCTCGAGTGGCGGTGGCGGTAGTGGGGGAGGC
GGTTCTGGCGGCGGAGGGTCCGGCGGTGGAGGATCAGAAAATGTATTGACACAGAGCCCCGCCTCCCTCAGTGCCTC
ACCTGGGGAAAGGGTAACTATCACTTGCTCTGCATCAAGCAGCGTCTCATACATGCATTGGTATCAACAAAAGCCTG
GACAGGCCCCCAAGCTCTGGATATACGATACGAGCAAGCTGGCTTCCGGCGTACCTAGCCGCTTCAGTGGTTCCGGC
TCAGGCAACGATCACACCCTTACGATTTCCAGTATGGAACCCGAAGATTTTGCAACTTATTATTGTTTCCAGGGGAG
CGTGTACCCATTCACTTTCGGGCAGGGGACAAAATTGGAGATAAAGTAG
>SEQ ID 178 SI-1H1 chain B aa
QSALTQPASVSGSPGQSITISCTGTSSDVGGYNFVSWYQQHPGKAPKLMIYDVSDRPSGVSDRFSGSKSGNTASLII
SGLQADDEADYYCSSYGSSSTHVIFGGGTKVTVLGGGGSGGGGSGGGGSGGGGSQVQLQESGGGLVKPGGSLRLSCA
ASGFTFSSYWMSWVRQAPGKGLEWVANINRDGSASYYVDSVKGRFTISRDDAKNSLYLQMNSLRAEDTAVYYCARDR
GVGYFDLWGRGTLVTVSSGGGGSGGGGSDVVMTQSPSTLSASVGDRVTINCQASESISSWLAWYQQKPGKAPKLLIY
EASKLASGVPSRFSGSGSGTEFTLTISSLQPDDFATYYCQGYFYFISRTYVNSFGGGTKVEIKRTVAAPSVFIFPPS
DEQLKSGTASVVCLLNNFYPREAKVQWKVDNALQSGNSQESVTEQDSKDSTYSLSSTLTLSKADYEKHKVYACEVTH
QGLSSPVTKSFNRGECGGGGSGGGGSQVTLKESGPGLVQPGQTLRLTCAFSGFSLSTSGMGVGWIRQPPGKGLEWLA
HIWWDDDKRYNPALKSRLTISKDTSKNQVYLQMNSLDAEDTAVYYCARMELWSYYFDYWGQGTLVTVSSGGGGSGGG
GSGGGGSGGGGSENVLTQSPASLSASPGERVTITCSASSSVSYMHWYQQKPGQAPKLWIYDTSKLASGVPSRFSGSG
SGNDHTLTISSMEPEDFATYYCFQGSVYPFTFGQGTKLEIK
>SEQ ID 183 SI-49R19 chain A nt
GAGATCGTGATGACACAATCTCCATCTACGCTCTCCGCCTCAGTGGGCGATAGAGTAATTATTACTTGTCAAGCCTC
AGAGAGCATTTCATCATGGCTCGCCTGGTATCAGCAAAAGCCTGGGAAGGCCCCCAAACTTCTCATCTATGAAGCAT
CAAAGCTGGCCTCTGGGGTTCCGTCTCGCTTCTCCGGGTCCGGCAGTGGTGCAGAGTTTACGTTGACTATATCTTCT
TTGCAACCTGACGATTTCGCAACATATTATTGCCAGGGATACTTTTATTTTATTTCCCGAACATATGTTAACTCTTT
TGGGTGCGGGACCAAACTCACTGTGCTGGGGTCTACCGGTAGTGGTTCTAAGCCTGGTTCAGGCGAAGGCAGTACGA
AAGGGGAAGTGCAACTGGTCGAAAGCGGTGGAGGGCTTGTTCAACCTGGAGGAAGCCTCCGCTTGTCCTGCACGGCT
AGCGGCTTTACAATAAGTACGAACGCCATGAGCTGGGTCCGGCAGGCTCCAGGTAAGTGTCTCGAATGGGTGGGGGT
CATAACAGGCAGGGACATTACCTACTACGCCAGTTGGGCCAAGGGTCGATTTACCATTTCTAGAGATACATCCAAGA
ACACGGTGTACCTCCAGATGAATTCTCTTAGGGCGGAAGACACAGCAGTATACTACTGCGCGCGAGATGGCGGGAGC
AGTGCGATCACATCCAACAACATCTGGGGTCAGGGCACTCTTGTCACGGTGTCGACTGGTGGTGGGGGTAGTGGCGG
CGGAGGTAGCTTTCTTAATTCCCTTTTCAACCAAGAGGTTCAGATCCCCTTGACTGAAAGCTATTGCGGCCCTTGTC
CGAAAAACTGGATATGTTACAAGAATAATTGTTACCAATTCTTCGACGAAAGCAAGAACTGGTATGAGAGTCAGGCG
TCTTGTATGAGTCAGAATGCCAGCCTGCTTAAGGTTTATTCAAAAGAAGACCAGGATCTGCTTAAGTTGGTAAAGAG
CTACCACTGGATGGGGCTGGTACATATCCCAACGAATGGGTCATGGCAGTGGGAGGACGGTTCTATTCTGAGTCCAA
ATCTCCTGACGATCATCGAAATGCAGAAAGGGGACTGTGCCCTGTATGCATCATCCTTCAAGGGGTACATCGAGAAC
TGCAGTACCCCAAATACCTACATTTGTATGCAAAGAACGGTTGCTAGCACCAAGGGCCCATCGGTCTTCCCCCTGGC
ACCCTCCTCCAAGAGCACCTCTGGGGGCACAGCGGCCCTGGGCTGCCTGGTCAAGGACTACTTCCCCGAACCGGTGA
CGGTGTCGTGGAACTCAGGCGCCCTGACCAGCGGCGTGCACACCTTCCCGGCTGTCCTACAGTCCTCAGGACTCTAC
TCCCTCAGCAGCGTGGTGACCGTGCCCTCCAGCAGCTTGGGCACCCAGACCTACATCTGCAACGTGAATCACAAGCC
CAGCAACACCAAGGTGGACAAGAGAGTTGAGCCCAAATCTTGTGACAAAACTCACACATGCCCACCGTGCCCAGCAC
CTGAAGCCGCGGGGGGACCGTCAGTCTTCCTCTTCCCCCCAAAACCCAAGGACACCCTCATGATCTCCCGGACCCCT
GAGGTCACATGCGTGGTGGTGGACGTGAGCCACGAAGACCCTGAGGTCAAGTTCAACTGGTACGTGGACGGCGTGGA
GGTGCATAATGCCAAGACAAAGCCGCGGGAGGAGCAGTACGCCAGCACGTACCGTGTGGTCAGCGTCCTCACCGTCC
TGCACCAGGACTGGCTGAATGGCAAGGAGTACAAGTGCGCGGTCTCCAACAAAGCCCTCCCAGCCCCCATCGAGAAA
ACCATCTCCAAAGCCAAAGGGCAGCCCCGAGAACCACAGGTGTACACCCTGCCCCCATCCCGGGATGAGCTGACCAA
GAACCAGGTCAGCCTGACCTGCCTGGTCAAAGGCTTCTATCCCAGCGACATCGCCGTGGAGTGGGAGAGCAATGGGC
AGCCGGAGAACAACTACAAGACCACGCCTCCCGTGCTGGACTCCGACGGCTCCTTCTTCCTCTATAGCAAGCTCACC
GTGGACAAGAGCAGGTGGCAGCAGGGGAACGTCTTCTCATGCTCCGTGATGCATGAGGCTCTGCACAACCACTACAC
GCAGAAGAGCCTCTCCCTGTCTCCGGGT
>SEQ ID 184 SI-49R19 chain A aa
EIVMTQSPSTLSASVGDRVIITCQASESISSWLAWYQQKPGKAPKLLIYEASKLASGVPSRFSGSGSGAEFTLTISS
LQPDDFATYYCQGYFYFISRTYVNSFGCGTKLTVLGSTGSGSKPGSGEGSTKGEVQLVESGGGLVQPGGSLRLSCTA
SGFTISTNAMSWVRQAPGKCLEWVGVITGRDITYYASWAKGRFTISRDTSKNTVYLQMNSLRAEDTAVYYCARDGGS
SAITSNNIWGQGTLVTVSTGGGGSGGGGSFLNSLFNQEVQIPLTESYCGPCPKNWICYKNNCYQFFDESKNWYESQA
SCMSQNASLLKVYSKEDQDLLKLVKSYHWMGLVHIPTNGSWQWEDGSILSPNLLTIIEMQKGDCALYASSFKGYIEN
CSTPNTYICMQRTVASTKGPSVFPLAPSSKSTSGGTAALGCLVKDYFPEPVTVSWNSGALTSGVHTFPAVLQSSGLY
SLSSVVTVPSSSLGTQTYICNVNHKPSNTKVDKRVEPKSCDKTHTCPPCPAPEAAGGPSVFLFPPKPKDTLMISRTP
EVTCVVVDVSHEDPEVKFNWYVDGVEVHNAKTKPREEQYASTYRVVSVLTVLHQDWLNGKEYKCAVSNKALPAPIEK
TISKAKGQPREPQVYTLPPSRDELTKNQVSLTCLVKGFYPSDIAVEWESNGQPENNYKTTPPVLDSDGSFFLYSKLT
VDKSRWQQGNVFSCSVMHEALHNHYTQKSLSLSPG
>SEQ ID 185 SI-49R19 chain B nt
TTCCTAAACTCATTATTCAACCAAGAAGTTCAAATTCCCTTGACCGAAAGTTACTGTGGCCCATGTCCTAAAAACTG
GATATGTTACAAAAATAACTGCTACCAATTTTTTGATGAGAGTAAAAACTGGTATGAGAGCCAGGCTTCTTGTATGT
CTCAAAATGCCAGCCTTCTGAAAGTATACAGCAAAGAGGACCAGGATTTACTTAAACTGGTGAAGTCATATCATTGG
ATGGGACTAGTACACATTCCAACAAATGGATCTTGGCAGTGGGAAGATGGCTCCATTCTCTCACCCAACCTACTAAC
AATAATTGAAATGCAGAAGGGAGACTGTGCACTCTATGCCTCGAGCTTTAAAGGCTATATAGAAAACTGTTCAACTC
CAAATACGTACATCTGCATGCAAAGGACTGTGCGTACGGTGGCTGCACCATCTGTCTTCATCTTCCCGCCATCTGAT
GAGCAGTTGAAATCTGGAACTGCCTCTGTTGTGTGCCTGCTGAATAACTTCTATCCCAGAGAGGCCAAAGTACAGTG
GAAGGTGGATAACGCCCTCCAATCGGGTAACTCCCAGGAGAGTGTCACAGAGCAGGACAGCAAGGACAGCACCTACA
GCCTCAGCAGCACCCTGACGCTGAGCAAAGCAGACTACGAGAAACACAAAGTCTACGCCTGCGAAGTCACCCATCAG
GGCCTGAGCTCGCCCGTCACAAAGAGCTTCAACAGGGGAGAGTGT
>SEQ ID 186 SI-49R19 chain B aa
FLNSLFNQEVQIPLTESYCGPCPKNWICYKNNCYQFFDESKNWYESQASCMSQNASLLKVYSKEDQDLLKLVKSYHW
MGLVHIPTNGSWQWEDGSILSPNLLTIIEMQKGDCALYASSFKGYIENCSTPNTYICMQRTVRTVAAPSVFIFPPSD
EQLKSGTASVVCLLNNFYPREAKVQWKVDNALQSGNSQESVTEQDSKDSTYSLSSTLTLSKADYEKHKVYACEVTHQ
GLSSPVTKSFNRGEC
>SEQ ID 187 SI-49R18 chain A nt
GAGATCGTGATGACACAATCTCCATCTACGCTCTCCGCCTCAGTGGGCGATAGAGTAATTATTACTTGTCAAGCCTC
AGAGAGCATTTCATCATGGCTCGCCTGGTATCAGCAAAAGCCTGGGAAGGCCCCCAAACTTCTCATCTATGAAGCAT
CAAAGCTGGCCTCTGGGGTTCCGTCTCGCTTCTCCGGGTCCGGCAGTGGTGCAGAGTTTACGTTGACTATATCTTCT
TTGCAACCTGACGATTTCGCAACATATTATTGCCAGGGATACTTTTATTTTATTTCCCGAACATATGTTAACTCTTT
TGGGTGCGGGACCAAACTCACTGTGCTGGGGTCTACCGGTAGTGGTTCTAAGCCTGGTTCAGGCGAAGGCAGTACGA
AAGGGGAAGTGCAACTGGTCGAAAGCGGTGGAGGGCTTGTTCAACCTGGAGGAAGCCTCCGCTTGTCCTGCACGGCT
AGCGGCTTTACAATAAGTACGAACGCCATGAGCTGGGTCCGGCAGGCTCCAGGTAAGTGTCTCGAATGGGTGGGGGT
CATAACAGGCAGGGACATTACCTACTACGCCAGTTGGGCCAAGGGTCGATTTACCATTTCTAGAGATACATCCAAGA
ACACGGTGTACCTCCAGATGAATTCTCTTAGGGCGGAAGACACAGCAGTATACTACTGCGCGCGAGATGGCGGGAGC
AGTGCGATCACATCCAACAACATCTGGGGTCAGGGCACTCTTGTCACGGTGTCGACTGGTGGTGGGGGTAGTGGCGG
CGGAGGTAGCTTTCTTAATTCCCTTTTCAACCAAGAGGTTCAGATCCCCTTGACTGAAAGCTATTGCGGCCCTTGTC
CGAAAAACTGGATATGTTACAAGAATAATTGTTACCAATTCTTCGACGAAAGCAAGAACTGGTATGAGAGTCAGGCG
TCTTGTATGAGTCAGAATGCCAGCCTGCTTAAGGTTTATTCAAAAGAAGACCAGGATCTGCTTAAGTTGGTAAAGAG
CTACCACTGGATGGGGCTGGTACATATCCCAACGAATGGGTCATGGCAGTGGGAGGACGGTTCTATTCTGAGTCCAA
ATCTCCTGACGATCATCGAAATGCAGAAAGGGGACTGTGCCCTGTATGCATCATCCTTCAAGGGGTACATCGAGAAC
TGCAGTACCCCAAATACCTACATTTGTATGCAAAGAACGGTTGCTAGCACCAAGGGCCCATCGGTCTTCCCCCTGGC
ACCCTCCTCCAAGAGCACCTCTGGGGGCACAGCGGCCCTGGGCTGCCTGGTCAAGGACTACTTCCCCGAACCGGTGA
CGGTGTCGTGGAACTCAGGCGCCCTGACCAGCGGCGTGCACACCTTCCCGGCTGTCCTACAGTCCTCAGGACTCTAC
TCCCTCAGCAGCGTGGTGACCGTGCCCTCCAGCAGCTTGGGCACCCAGACCTACATCTGCAACGTGAATCACAAGCC
CAGCAACACCAAGGTGGACAAGAGAGTTGAGCCCAAATCTTGTGACAAAACTCACACATGCCCACCGTGCCCAGCAC
CTGAAGCCGCGGGGGGACCGTCAGTCTTCCTCTTCCCCCCAAAACCCAAGGACACCCTCATGATCTCCCGGACCCCT
GAGGTCACATGCGTGGTGGTGGACGTGAGCCACGAAGACCCTGAGGTCAAGTTCAACTGGTACGTGGACGGCGTGGA
GGTGCATAATGCCAAGACAAAGCCGCGGGAGGAGCAGTACGCCAGCACGTACCGTGTGGTCAGCGTCCTCACCGTCC
TGCACCAGGACTGGCTGAATGGCAAGGAGTACAAGTGCGCGGTCTCCAACAAAGCCCTCCCAGCCCCCATCGAGAAA
ACCATCTCCAAAGCCAAAGGGCAGCCCCGAGAACCACAGGTGTACACCCTGCCCCCATCCCGGGATGAGCTGACCAA
GAACCAGGTCAGCCTGACCTGCCTGGTCAAAGGCTTCTATCCCAGCGACATCGCCGTGGAGTGGGAGAGCAATGGGC
AGCCGGAGAACAACTACAAGACCACGCCTCCCGTGCTGGACTCCGACGGCTCCTTCTTCCTCTATAGCAAGCTCACC
GTGGACAAGAGCAGGTGGCAGCAGGGGAACGTCTTCTCATGCTCCGTGATGCATGAGGCTCTGCACAACCACTACAC
GCAGAAGAGCCTCTCCCTGTCTCCGGGT
>SEQ ID 188 SI-49R18 chain A aa
EIVMTQSPSTLSASVGDRVIITCQASESISSWLAWYQQKPGKAPKLLIYEASKLASGVPSRFSGSGSGAEFTLTISS
LQPDDFATYYCQGYFYFISRTYVNSFGCGTKLTVLGSTGSGSKPGSGEGSTKGEVQLVESGGGLVQPGGSLRLSCTA
SGFTISTNAMSWVRQAPGKCLEWVGVITGRDITYYASWAKGRFTISRDTSKNTVYLQMNSLRAEDTAVYYCARDGGS
SAITSNNIWGQGTLVTVSTGGGGSGGGGSFLNSLFNQEVQIPLTESYCGPCPKNWICYKNNCYQFFDESKNWYESQA
SCMSQNASLLKVYSKEDQDLLKLVKSYHWMGLVHIPTNGSWQWEDGSILSPNLLTIIEMQKGDCALYASSFKGYIEN
CSTPNTYICMQRTVASTKGPSVFPLAPSSKSTSGGTAALGCLVKDYFPEPVTVSWNSGALTSGVHTFPAVLQSSGLY
SLSSVVTVPSSSLGTQTYICNVNHKPSNTKVDKRVEPKSCDKTHTCPPCPAPEAAGGPSVFLFPPKPKDTLMISRTP
EVTCVVVDVSHEDPEVKFNWYVDGVEVHNAKTKPREEQYASTYRVVSVLTVLHQDWLNGKEYKCAVSNKALPAPIEK
TISKAKGQPREPQVYTLPPSRDELTKNQVSLTCLVKGFYPSDIAVEWESNGQPENNYKTTPPVLDSDGSFFLYSKLT
VDKSRWQQGNVFSCSVMHEALHNHYTQKSLSLSPG
>SEQ ID 189 SI-49R18 chain B nt
GAAAATGTATTGACACAGAGCCCCGCCTCCCTCAGTGCCTCACCTGGGGAAAGGGTAACTATCACTTGCTCTGCATC
AAGCAGCGTCTCATACATGCATTGGTATCAACAAAAGCCTGGACAGGCCCCCAAGCTCTGGATATACGATACGAGCA
AGCTGGCTTCCGGCGTACCTAGCCGCTTCAGTGGTTCCGGCTCAGGCAACGATCACACCCTTACGATTTCCAGTATG
GAACCCGAAGATTTTGCAACTTATTATTGTTTCCAGGGGAGCGTGTACCCATTCACTTTCGGGCAGGGGACAAAATT
GGAGATAAAGGGAAGTACTGGTTCTGGGTCTAAACCCGGTTCCGGCGAAGGTAGTACTAAAGGACAGGTCACATTGA
AGGAATCTGGCCCCGGCCTTGTTCAGCCAGGACAGACCCTTAGGCTCACCTGTGCCTTCAGTGGTTTTTCTCTTAGC
ACTAGCGGTATGGGGGTCGGCTGGATTCGGCAGCCTCCCGGCAAAGGTCTTGAGTGGTTGGCTCACATTTGGTGGGA
CGACGACAAACGGTATAATCCTGCCTTGAAAAGTCGGCTGACCATTAGTAAGGATACCTCAAAAAATCAAGTGTACT
TGCAAATGAATAGCCTTGACGCCGAGGATACGGCTGTATATTATTGCGCGCGGATGGAACTCTGGTCTTACTACTTT
GATTATTGGGGGCAGGGGACTCTCGTCACGGTGTCCTCTGGTGGCGGCGGCTCCGGGGGTGGCGGATCAGGTGGTGG
AGGATCCTTCCTAAACTCATTATTCAACCAAGAAGTTCAAATTCCCTTGACCGAAAGTTACTGTGGCCCATGTCCTA
AAAACTGGATATGTTACAAAAATAACTGCTACCAATTTTTTGATGAGAGTAAAAACTGGTATGAGAGCCAGGCTTCT
TGTATGTCTCAAAATGCCAGCCTTCTGAAAGTATACAGCAAAGAGGACCAGGATTTACTTAAACTGGTGAAGTCATA
TCATTGGATGGGACTAGTACACATTCCAACAAATGGATCTTGGCAGTGGGAAGATGGCTCCATTCTCTCACCCAACC
TACTAACAATAATTGAAATGCAGAAGGGAGACTGTGCACTCTATGCCTCGAGCTTTAAAGGCTATATAGAAAACTGT
TCAACTCCAAATACGTACATCTGCATGCAAAGGACTGTGCGTACGGTGGCTGCACCATCTGTCTTCATCTTCCCGCC
ATCTGATGAGCAGTTGAAATCTGGAACTGCCTCTGTTGTGTGCCTGCTGAATAACTTCTATCCCAGAGAGGCCAAAG
TACAGTGGAAGGTGGATAACGCCCTCCAATCGGGTAACTCCCAGGAGAGTGTCACAGAGCAGGACAGCAAGGACAGC
ACCTACAGCCTCAGCAGCACCCTGACGCTGAGCAAAGCAGACTACGAGAAACACAAAGTCTACGCCTGCGAAGTCAC
CCATCAGGGCCTGAGCTCGCCCGTCACAAAGAGCTTCAACAGGGGAGAGTGT
>SEQ ID 190 SI-49R18 chain B aa
ENVLTQSPASLSASPGERVTITCSASSSVSYMHWYQQKPGQAPKLWIYDTSKLASGVPSRFSGSGSGNDHTLTISSM
EPEDFATYYCFQGSVYPFTFGQGTKLEIKGSTGSGSKPGSGEGSTKGQVTLKESGPGLVQPGQTLRLTCAFSGFSLS
TSGMGVGWIRQPPGKGLEWLAHIWWDDDKRYNPALKSRLTISKDTSKNQVYLQMNSLDAEDTAVYYCARMELWSYYF
DYWGQGTLVTVSSGGGGSGGGGSGGGGSFLNSLFNQEVQIPLTESYCGPCPKNWICYKNNCYQFFDESKNWYESQAS
CMSQNASLLKVYSKEDQDLLKLVKSYHWMGLVHIPTNGSWQWEDGSILSPNLLTIIEMQKGDCALYASSFKGYIENG
STPNTYICMQRTVRTVAAPSVFIFPPSDEQLKSGTASVVCLLNNFYPREAKVQWKVDNALQSGNSQESVTEQDSKDS
TYSLSSTLTLSKADYEKHKVYACEVTHQGLSSPVTKSFNRGEC
>SEQ ID 191 SI-49E15 chain A nt
GAGATCGTGATGACACAATCTCCATCTACGCTCTCCGCCTCAGTGGGCGATAGAGTAATTATTACTTGTCAAGCCTC
AGAGAGCATTTCATCATGGCTCGCCTGGTATCAGCAAAAGCCTGGGAAGGCCCCCAAACTTCTCATCTATGAAGCAT
CAAAGCTGGCCTCTGGGGTTCCGTCTCGCTTCTCCGGGTCCGGCAGTGGTGCAGAGTTTACGTTGACTATATCTTCT
TTGCAACCTGACGATTTCGCAACATATTATTGCCAGGGATACTTTTATTTTATTTCCCGAACATATGTTAACTCTTT
TGGGTGCGGGACCAAACTCACTGTGCTGGGGTCTACCGGTAGTGGTTCTAAGCCTGGTTCAGGCGAAGGCAGTACGA
AAGGGGAAGTGCAACTGGTCGAAAGCGGTGGAGGGCTTGTTCAACCTGGAGGAAGCCTCCGCTTGTCCTGCACGGCT
AGCGGCTTTACAATAAGTACGAACGCCATGAGCTGGGTCCGGCAGGCTCCAGGTAAGTGTCTCGAATGGGTGGGGGT
CATAACAGGCAGGGACATTACCTACTACGCCAGTTGGGCCAAGGGTCGATTTACCATTTCTAGAGATACATCCAAGA
ACACGGTGTACCTCCAGATGAATTCTCTTAGGGCGGAAGACACAGCAGTATACTACTGCGCGCGAGATGGCGGGAGC
AGTGCGATCACATCCAACAACATCTGGGGTCAGGGCACTCTTGTCACGGTGTCGACTGGTGGTGGGGGTAGTGGCGG
CGGAGGTAGCTTTCTTAATTCCCTTTTCAACCAAGAGGTTCAGATCCCCTTGACTGAAAGCTATTGCGGCCCTTGTC
CGAAAAACTGGATATGTTACAAGAATAATTGTTACCAATTCTTCGACGAAAGCAAGAACTGGTATGAGAGTCAGGCG
TCTTGTATGAGTCAGAATGCCAGCCTGCTTAAGGTTTATTCAAAAGAAGACCAGGATCTGCTTAAGTTGGTAAAGAG
CTACCACTGGATGGGGCTGGTACATATCCCAACGAATGGGTCATGGCAGTGGGAGGACGGTTCTATTCTGAGTCCAA
ATCTCCTGACGATCATCGAAATGCAGAAAGGGGACTGTGCCCTGTATGCATCATCCTTCAAGGGGTACATCGAGAAC
TGCAGTACCCCAAATACCTACATTTGTATGCAAAGAACGGTTGCTAGCACCAAGGGCCCATCGGTCTTCCCCCTGGC
ACCCTCCTCCAAGAGCACCTCTGGGGGCACAGCGGCCCTGGGCTGCCTGGTCAAGGACTACTTCCCCGAACCGGTGA
CGGTGTCGTGGAACTCAGGCGCCCTGACCAGCGGCGTGCACACCTTCCCGGCTGTCCTACAGTCCTCAGGACTCTAC
TCCCTCAGCAGCGTGGTGACCGTGCCCTCCAGCAGCTTGGGCACCCAGACCTACATCTGCAACGTGAATCACAAGCC
CAGCAACACCAAGGTGGACAAGAGAGTTGAGCCCAAATCTTGTGACAAAACTCACACATGCCCACCGTGCCCAGCAC
CTGAAGCCGCGGGGGGACCGTCAGTCTTCCTCTTCCCCCCAAAACCCAAGGACACCCTCATGATCTCCCGGACCCCT
GAGGTCACATGCGTGGTGGTGGACGTGAGCCACGAAGACCCTGAGGTCAAGTTCAACTGGTACGTGGACGGCGTGGA
GGTGCATAATGCCAAGACAAAGCCGCGGGAGGAGCAGTACGCCAGCACGTACCGTGTGGTCAGCGTCCTCACCGTCC
TGCACCAGGACTGGCTGAATGGCAAGGAGTACAAGTGCGCGGTCTCCAACAAAGCCCTCCCAGCCCCCATCGAGAAA
ACCATCTCCAAAGCCAAAGGGCAGCCCCGAGAACCACAGGTGTACACCCTGCCCCCATCCCGGGATGAGCTGACCAA
GAACCAGGTCAGCCTGACCTGCCTGGTCAAAGGCTTCTATCCCAGCGACATCGCCGTGGAGTGGGAGAGCAATGGGC
AGCCGGAGAACAACTACAAGACCACGCCTCCCGTGCTGGACTCCGACGGCTCCTTCTTCCTCTATAGCAAGCTCACC
GTGGACAAGAGCAGGTGGCAGCAGGGGAACGTCTTCTCATGCTCCGTGATGCATGAGGCTCTGCACAACCACTACAC
GCAGAAGAGCCTCTCCCTGTCTCCGGGTGGCGGTGGAGGGTCCGGCGGTGGTGGATCCGAGGTGCAGCTGTTGGAGT
CTGGGGGAGGCTTGGTACAGCCTGGGGGGTCCCTGAGACTCTCCTGTGCAGCCTCTGGATTCTCCTTCAGTAGCGGG
TACGACATGTGCTGGGTCCGCCAGGCTCCAGGGAAGTGCCTGGAGTGGATCGCATGCATTGCTGCTGGTAGTGCTGG
TATCACTTACGACGCGAACTGGGCGAAAGGCCGGTTCACCATCTCCAGAGACAATTCCAAGAACACGCTGTATCTGC
AAATGAACAGCCTGAGAGCCGAGGACACGGCCGTATATTACTGTGCGAGATCGGCGTTTTCGTTCGACTACGCCATG
GACCTCTGGGGCCAGGGAACCCTGGTCACCGTCTCGAGCGGTGGAGGCGGTTCAGGCGGAGGTGGAAGTGGTGGTGG
CGGCTCTGGAGGCGGCGGATCTGACATCCAGATGACCCAGTCTCCTTCCACCCTGTCTGCATCTGTAGGAGACAGAG
TCACCATCACTTGCCAGGCCAGTCAGAGCATTAGTTCCCACTTAAACTGGTATCAGCAGAAACCAGGGAAAGCCCCT
AAGCTCCTGATCTATAAGGCATCCACTCTGGCATCTGGGGTCCCATCAAGGTTCAGCGGCAGTGGATCTGGGACAGA
ATTTACTCTCACCATCAGCAGCCTGCAGCCTGATGATTTTGCAACTTATTACTGCCAACAGGGTTATAGTTGGGGTA
ATGTTGATAATGTTTTCGGCTGCGGGACCAAGGTGGAGATCAAAGGTGGTGGCGGCTCTGGAGGAGGAGGGTCCGGA
CGGTCGCTGGTGGAGTCTGGGGGAGGCTTGGTCCAGCCTGGGGGGTCCCTGAGACTCTCCTGTACTGCCTCTGGATT
CACCATCAGTAGCTACCACATGCAGTGGGTCCGGCAGGCACCTGGGAAGTGCCTGGAGTACATCGGAACCATTAGTA
GTGGTGGTAATGTATACTACGCAAGCTCCGCTAGAGGCAGATTCACCATCTCCAGACCCTCGTCCAAGAACACGGTG
GATCTTCAAATGAACAGCCTGAGAGCCGAGGACACGGCTGTGTATTACTGTGCGAGAGACTCTGGTTATAGTGATCC
TATGTGGGGCCAGGGAACCCTGGTCACCGTCTCTTCAGGCGGTGGCGGTAGTGGGGGAGGCGGTTCTGGCGGCGGAG
GGTCCGGCGGTGGAGGATCAGACGTTGTGATGACCCAGTCTCCATCTTCCGTGTCTGCATCTGTAGGAGACAGAGTC
ACCATCACCTGTCAGGCCAGTCAGAACATTAGGACTTACTTATCCTGGTATCAGCAGAAACCAGGGAAAGCCCCTAA
GCTCCTGATCTATGCTGCAGCCAATCTGGCATCTGGGGTCCCATCAAGGTTCAGCGGCAGTGGATCTGGGACAGATT
TCACTCTCACCATCAGCGACTTGGAACCTGGCGATGCTGCAACTTACTATTGTCAGTCTACCTATCTTGGTACTGAT
TATGTTGGCGGTGCTTTCGGCTGTGGGACCAAGGTGGAGATCAAA
>SEQ ID 192 SI-49E15 chain A aa
EIVMTQSPSTLSASVGDRVIITCQASESISSWLAWYQQKPGKAPKLLIYEASKLASGVPSRFSGSGSGAEFTLTISS
LQPDDFATYYCQGYFYFISRTYVNSFGCGTKLTVLGSTGSGSKPGSGEGSTKGEVQLVESGGGLVQPGGSLRLSCTA
SGFTISTNAMSWVRQAPGKCLEWVGVITGRDITYYASWAKGRFTISRDTSKNTVYLQMNSLRAEDTAVYYCARDGGS
SAITSNNIWGQGTLVTVSTGGGGSGGGGSFLNSLFNQEVQIPLTESYCGPCPKNWICYKNNCYQFFDESKNWYESQA
SCMSQNASLLKVYSKEDQDLLKLVKSYHWMGLVHIPTNGSWQWEDGSILSPNLLTIIEMQKGDCALYASSFKGYIEN
CSTPNTYICMQRTVASTKGPSVFPLAPSSKSTSGGTAALGCLVKDYFPEPVTVSWNSGALTSGVHTFPAVLQSSGLY
SLSSVVTVPSSSLGTQTYICNVNHKPSNTKVDKRVEPKSCDKTHTCPPCPAPEAAGGPSVFLFPPKPKDTLMISRTP
EVTCVVVDVSHEDPEVKFNWYVDGVEVHNAKTKPREEQYASTYRVVSVLTVLHQDWLNGKEYKCAVSNKALPAPIEK
TISKAKGQPREPQVYTLPPSRDELTKNQVSLTCLVKGFYPSDIAVEWESNGQPENNYKTTPPVLDSDGSFFLYSKLT
VDKSRWQQGNVFSCSVMHEALHNHYTQKSLSLSPGGGGGSGGGGSEVQLLESGGGLVQPGGSLRLSCAASGFSFSSG
YDMCWVRQAPGKCLEWIACIAAGSAGITYDANWAKGRFTISRDNSKNTLYLQMNSLRAEDTAVYYCARSAFSFDYAM
DLWGQGTLVTVSSGGGGSGGGGSGGGGSGGGGSDIQMTQSPSTLSASVGDRVTITCQASQSISSHLNWYQQKPGKAP
KLLIYKASTLASGVPSRFSGSGSGTEFTLTISSLQPDDFATYYCQQGYSWGNVDNVFGCGTKVEIKGGGGSGGGGSG
RSLVESGGGLVQPGGSLRLSCTASGFTISSYHMQWVRQAPGKCLEYIGTISSGGNVYYASSARGRFTISRPSSKNTV
DLQMNSLRAEDTAVYYCARDSGYSDPMWGQGTLVTVSSGGGGSGGGGSGGGGSGGGGSDVVMTQSPSSVSASVGDRV
TITCQASQNIRTYLSWYQQKPGKAPKLLIYAAANLASGVPSRFSGSGSGTDFTLTISDLEPGDAATYYCQSTYLGTD
YVGGAFGCGTKVEIK
>SEQ ID 193 SI-49E15 chain B nt
TTCCTAAACTCATTATTCAACCAAGAAGTTCAAATTCCCTTGACCGAAAGTTACTGTGGCCCATGTCCTAAAAACTG
GATATGTTACAAAAATAACTGCTACCAATTTTTTGATGAGAGTAAAAACTGGTATGAGAGCCAGGCTTCTTGTATGT
CTCAAAATGCCAGCCTTCTGAAAGTATACAGCAAAGAGGACCAGGATTTACTTAAACTGGTGAAGTCATATCATTGG
ATGGGACTAGTACACATTCCAACAAATGGATCTTGGCAGTGGGAAGATGGCTCCATTCTCTCACCCAACCTACTAAC
AATAATTGAAATGCAGAAGGGAGACTGTGCACTCTATGCCTCGAGCTTTAAAGGCTATATAGAAAACTGTTCAACTC
CAAATACGTACATCTGCATGCAAAGGACTGTGCGTACGGTGGCTGCACCATCTGTCTTCATCTTCCCGCCATCTGAT
GAGCAGTTGAAATCTGGAACTGCCTCTGTTGTGTGCCTGCTGAATAACTTCTATCCCAGAGAGGCCAAAGTACAGTG
GAAGGTGGATAACGCCCTCCAATCGGGTAACTCCCAGGAGAGTGTCACAGAGCAGGACAGCAAGGACAGCACCTACA
GCCTCAGCAGCACCCTGACGCTGAGCAAAGCAGACTACGAGAAACACAAAGTCTACGCCTGCGAAGTCACCCATCAG
GGCCTGAGCTCGCCCGTCACAAAGAGCTTCAACAGGGGAGAGTGT
>SEQ ID 194 SI-49E15 chain B aa
FLNSLFNQEVQIPLTESYCGPCPKNWICYKNNCYQFFDESKNWYESQASCMSQNASLLKVYSKEDQDLLKLVKSYHW
MGLVHIPTNGSWQWEDGSILSPNLLTIIEMQKGDCALYASSFKGYIENCSTPNTYICMQRTVRTVAAPSVFIFPPSD
EQLKSGTASVVCLLNNFYPREAKVQWKVDNALQSGNSQESVTEQDSKDSTYSLSSTLTLSKADYEKHKVYACEVTHQ
GLSSPVTKSFNRGEC
>SEQ ID 195 SI-49R21 chain A nt
TTTCTTAATTCCCTTTTCAACCAAGAGGTTCAGATCCCCTTGACTGAAAGCTATTGCGGCCCTTGTCCGAAAAACTG
GATATGTTACAAGAATAATTGTTACCAATTCTTCGACGAAAGCAAGAACTGGTATGAGAGTCAGGCGTCTTGTATGA
GTCAGAATGCCAGCCTGCTTAAGGTTTATTCAAAAGAAGACCAGGATCTGCTTAAGTTGGTAAAGAGCTACCACTGG
ATGGGGCTGGTACATATCCCAACGAATGGGTCATGGCAGTGGGAGGACGGTTCTATTCTGAGTCCAAATCTCCTGAC
GATCATCGAAATGCAGAAAGGGGACTGTGCCCTGTATGCATCATCCTTCAAGGGGTACATCGAGAACTGCAGTACCC
CAAATACCTACATTTGTATGCAAAGAACGGTTGCTAGCACCAAGGGCCCATCGGTCTTCCCCCTGGCACCCTCCTCC
AAGAGCACCTCTGGGGGCACAGCGGCCCTGGGCTGCCTGGTCAAGGACTACTTCCCCGAACCGGTGACGGTGTCGTG
GAACTCAGGCGCCCTGACCAGCGGCGTGCACACCTTCCCGGCTGTCCTACAGTCCTCAGGACTCTACTCCCTCAGCA
GCGTGGTGACCGTGCCCTCCAGCAGCTTGGGCACCCAGACCTACATCTGCAACGTGAATCACAAGCCCAGCAACACC
AAGGTGGACAAGAGAGTTGAGCCCAAATCTTGTGACAAAACTCACACATGCCCACCGTGCCCAGCACCTGAAGCCGC
GGGGGGACCGTCAGTCTTCCTCTTCCCCCCAAAACCCAAGGACACCCTCATGATCTCCCGGACCCCTGAGGTCACAT
GCGTGGTGGTGGACGTGAGCCACGAAGACCCTGAGGTCAAGTTCAACTGGTACGTGGACGGCGTGGAGGTGCATAAT
GCCAAGACAAAGCCGCGGGAGGAGCAGTACGCCAGCACGTACCGTGTGGTCAGCGTCCTCACCGTCCTGCACCAGGA
CTGGCTGAATGGCAAGGAGTACAAGTGCGCGGTCTCCAACAAAGCCCTCCCAGCCCCCATCGAGAAAACCATCTCCA
AAGCCAAAGGGCAGCCCCGAGAACCACAGGTGTACACCCTGCCCCCATCCCGGGATGAGCTGACCAAGAACCAGGTC
AGCCTGACCTGCCTGGTCAAAGGCTTCTATCCCAGCGACATCGCCGTGGAGTGGGAGAGCAATGGGCAGCCGGAGAA
CAACTACAAGACCACGCCTCCCGTGCTGGACTCCGACGGCTCCTTCTTCCTCTATAGCAAGCTCACCGTGGACAAGA
GCAGGTGGCAGCAGGGGAACGTCTTCTCATGCTCCGTGATGCATGAGGCTCTGCACAACCACTACACGCAGAAGAGC
CTCTCCCTGTCTCCGGGTAAA
>SEQ ID 196 SI-49R21 chain A aa
FLNSLFNQEVQIPLTESYCGPCPKNWICYKNNCYQFFDESKNWYESQASCMSQNASLLKVYSKEDQDLLKLVKSYHW
MGLVHIPTNGSWQWEDGSILSPNLLTIIEMQKGDCALYASSFKGYIENCSTPNTYICMQRTVASTKGPSVFPLAPSS
KSTSGGTAALGCLVKDYFPEPVTVSWNSGALTSGVHTFPAVLQSSGLYSLSSVVTVPSSSLGTQTYICNVNHKPSNT
KVDKRVEPKSCDKTHTCPPCPAPEAAGGPSVFLFPPKPKDTLMISRTPEVTCVVVDVSHEDPEVKFNWYVDGVEVHN
AKTKPREEQYASTYRVVSVLTVLHQDWLNGKEYKCAVSNKALPAPIEKTISKAKGQPREPQVYTLPPSRDELTKNQV
SLTCLVKGFYPSDIAVEWESNGQPENNYKTTPPVLDSDGSFFLYSKLTVDKSRWQQGNVFSCSVMHEALHNHYTQKS
LSLSPGK
>SEQ ID 197 SI-49R21 chain B nt
TTCCTAAACTCATTATTCAACCAAGAAGTTCAAATTCCCTTGACCGAAAGTTACTGTGGCCCATGTCCTAAAAACTG
GATATGTTACAAAAATAACTGCTACCAATTTTTTGATGAGAGTAAAAACTGGTATGAGAGCCAGGCTTCTTGTATGT
CTCAAAATGCCAGCCTTCTGAAAGTATACAGCAAAGAGGACCAGGATTTACTTAAACTGGTGAAGTCATATCATTGG
ATGGGACTAGTACACATTCCAACAAATGGATCTTGGCAGTGGGAAGATGGCTCCATTCTCTCACCCAACCTACTAAC
AATAATTGAAATGCAGAAGGGAGACTGTGCACTCTATGCCTCGAGCTTTAAAGGCTATATAGAAAACTGTTCAACTC
CAAATACGTACATCTGCATGCAAAGGACTGTGCGTACGGTGGCTGCACCATCTGTCTTCATCTTCCCGCCATCTGAT
GAGCAGTTGAAATCTGGAACTGCCTCTGTTGTGTGCCTGCTGAATAACTTCTATCCCAGAGAGGCCAAAGTACAGTG
GAAGGTGGATAACGCCCTCCAATCGGGTAACTCCCAGGAGAGTGTCACAGAGCAGGACAGCAAGGACAGCACCTACA
GCCTCAGCAGCACCCTGACGCTGAGCAAAGCAGACTACGAGAAACACAAAGTCTACGCCTGCGAAGTCACCCATCAG
GGCCTGAGCTCGCCCGTCACAAAGAGCTTCAACAGGGGAGAGTGT
>SEQ ID 198 SI-49R21 chain B aa
FLNSLFNQEVQIPLTESYCGPCPKNWICYKNNCYQFFDESKNWYESQASCMSQNASLLKVYSKEDQDLLKLVKSYHW
MGLVHIPTNGSWQWEDGSILSPNLLTIIEMQKGDCALYASSFKGYIENCSTPNTYICMQRTVRTVAAPSVFIFPPSD
EQLKSGTASVVCLLNNFYPREAKVQWKVDNALQSGNSQESVTEQDSKDSTYSLSSTLTLSKADYEKHKVYACEVTHQ
GLSSPVTKSFNRGEC
>SEQ ID 199 SI-49R22 chain A nt
TTTCTTAATTCCCTTTTCAACCAAGAGGTTCAGATCCCCTTGACTGAAAGCTATTGCGGCCCTTGTCCGAAAAACTG
GATATGTTACAAGAATAATTGTTACCAATTCTTCGACGAAAGCAAGAACTGGTATGAGAGTCAGGCGTCTTGTATGA
GTCAGAATGCCAGCCTGCTTAAGGTTTATTCAAAAGAAGACCAGGATCTGCTTAAGTTGGTAAAGAGCTACCACTGG
ATGGGGCTGGTACATATCCCAACGAATGGGTCATGGCAGTGGGAGGACGGTTCTATTCTGAGTCCAAATCTCCTGAC
GATCATCGAAATGCAGAAAGGGGACTGTGCCCTGTATGCATCATCCTTCAAGGGGTACATCGAGAACTGCAGTACCC
CAAATACCTACATTTGTATGCAAAGAACGGTTGCTAGCACCAAGGGCCCATCGGTCTTCCCCCTGGCACCCTCCTCC
AAGAGCACCTCTGGGGGCACAGCGGCCCTGGGCTGCCTGGTCAAGGACTACTTCCCCGAACCGGTGACGGTGTCGTG
GAACTCAGGCGCCCTGACCAGCGGCGTGCACACCTTCCCGGCTGTCCTACAGTCCTCAGGACTCTACTCCCTCAGCA
GCGTGGTGACCGTGCCCTCCAGCAGCTTGGGCACCCAGACCTACATCTGCAACGTGAATCACAAGCCCAGCAACACC
AAGGTGGACAAGAGAGTTGAGCCCAAATCTTGTGACAAAACTCACACATGCCCACCGTGCCCAGCACCTGAAGCCGC
GGGGGGACCGTCAGTCTTCCTCTTCCCCCCAAAACCCAAGGACACCCTCATGATCTCCCGGACCCCTGAGGTCACAT
GCGTGGTGGTGGACGTGAGCCACGAAGACCCTGAGGTCAAGTTCAACTGGTACGTGGACGGCGTGGAGGTGCATAAT
GCCAAGACAAAGCCGCGGGAGGAGCAGTACGCCAGCACGTACCGTGTGGTCAGCGTCCTCACCGTCCTGCACCAGGA
CTGGCTGAATGGCAAGGAGTACAAGTGCGCGGTCTCCAACAAAGCCCTCCCAGCCCCCATCGAGAAAACCATCTCCA
AAGCCAAAGGGCAGCCCCGAGAACCACAGGTGTACACCCTGCCCCCATGTCGGGATGAGCTGACCAAGAACCAGGTC
AGCCTGTGGTGCCTGGTCAAAGGCTTCTATCCCAGCGACATCGCCGTGGAGTGGGAGAGCAATGGGCAGCCGGAGAA
CAACTACAAGACCACGCCTCCCGTGCTGGACTCCGACGGCTCCTTCTTCCTCTATAGCAAGCTCACCGTGGACAAGA
GCAGGTGGCAGCAGGGGAACGTCTTCTCATGCTCCGTGATGCATGAGGCTCTGCACAACCACTACACGCAGAAGAGC
CTCTCCCTGTCTCCGGGTAAA
>SEQ ID 200 SI-49R22 chain A aa
FLNSLFNQEVQIPLTESYCGPCPKNWICYKNNCYQFFDESKNWYESQASCMSQNASLLKVYSKEDQDLLKLVKSYHW
MGLVHIPTNGSWQWEDGSILSPNLLTIIEMQKGDCALYASSFKGYIENCSTPNTYICMQRTVASTKGPSVFPLAPSS
KSTSGGTAALGCLVKDYFPEPVTVSWNSGALTSGVHTFPAVLQSSGLYSLSSVVTVPSSSLGTQTYICNVNHKPSNT
KVDKRVEPKSCDKTHTCPPCPAPEAAGGPSVFLFPPKPKDTLMISRTPEVTCVVVDVSHEDPEVKFNWYVDGVEVHN
AKTKPREEQYASTYRVVSVLTVLHQDWLNGKEYKCAVSNKALPAPIEKTISKAKGQPREPQVYTLPPCRDELTKNQV
SLWCLVKGFYPSDIAVEWESNGQPENNYKTTPPVLDSDGSFFLYSKLTVDKSRWQQGNVFSCSVMHEALHNHYTQKS
LSLSPGK
>SEQ ID 201 SI-49R22 chain B nt
TTCCTAAACTCATTATTCAACCAAGAAGTTCAAATTCCCTTGACCGAAAGTTACTGTGGCCCATGTCCTAAAAACTG
GATATGTTACAAAAATAACTGCTACCAATTTTTTGATGAGAGTAAAAACTGGTATGAGAGCCAGGCTTCTTGTATGT
CTCAAAATGCCAGCCTTCTGAAAGTATACAGCAAAGAGGACCAGGATTTACTTAAACTGGTGAAGTCATATCATTGG
ATGGGACTAGTACACATTCCAACAAATGGATCTTGGCAGTGGGAAGATGGCTCCATTCTCTCACCCAACCTACTAAC
AATAATTGAAATGCAGAAGGGAGACTGTGCACTCTATGCCTCGAGCTTTAAAGGCTATATAGAAAACTGTTCAACTC
CAAATACGTACATCTGCATGCAAAGGACTGTGCGTACGGTGGCTGCACCATCTGTCTTCATCTTCCCGCCATCTGAT
GAGCAGTTGAAATCTGGAACTGCCTCTGTTGTGTGCCTGCTGAATAACTTCTATCCCAGAGAGGCCAAAGTACAGTG
GAAGGTGGATAACGCCCTCCAATCGGGTAACTCCCAGGAGAGTGTCACAGAGCAGGACAGCAAGGACAGCACCTACA
GCCTCAGCAGCACCCTGACGCTGAGCAAAGCAGACTACGAGAAACACAAAGTCTACGCCTGCGAAGTCACCCATCAG
GGCCTGAGCTCGCCCGTCACAAAGAGCTTCAACAGGGGAGAGTGT
>SEQ ID 202 SI-49R22 chain B aa
FLNSLFNQEVQIPLTESYCGPCPKNWICYKNNCYQFFDESKNWYESQASCMSQNASLLKVYSKEDQDLLKLVKSYHW
MGLVHIPTNGSWQWEDGSILSPNLLTIIEMQKGDCALYASSFKGYIENCSTPNTYICMQRTVRTVAAPSVFIFPPSD
EQLKSGTASVVCLLNNFYPREAKVQWKVDNALQSGNSQESVTEQDSKDSTYSLSSTLTLSKADYEKHKVYACEVTHQ
GLSSPVTKSFNRGEC
>SEQ ID 203 SI-49R22 chain C nt
TTTCTTAATTCCCTTTTCAACCAAGAGGTTCAGATCCCCTTGACTGAAAGCTATTGCGGCCCTTGTCCGAAAAACTG
GATATGTTACAAGAATAATTGTTACCAATTCTTCGACGAAAGCAAGAACTGGTATGAGAGTCAGGCGTCTTGTATGA
GTCAGAATGCCAGCCTGCTTAAGGTTTATTCAAAAGAAGACCAGGATCTGCTTAAGTTGGTAAAGAGCTACCACTGG
ATGGGGCTGGTACATATCCCAACGAATGGGTCATGGCAGTGGGAGGACGGTTCTATTCTGAGTCCAAATCTCCTGAC
GATCATCGAAATGCAGAAAGGGGACTGTGCCCTGTATGCATCATCCTTCAAGGGGTACATCGAGAACTGCAGTACCC
CAAATACCTACATTTGTATGCAAAGAACGGTTGCTAGCACCAAGGGCCCATCGGTCTTCCCCCTGGCACCCTCCTCC
AAGAGCACCTCTGGGGGCACAGCGGCCCTGGGCTGCCTGGTCAAGGACTACTTCCCCGAACCGGTGACGGTGTCGTG
GAACTCAGGCGCCCTGACCAGCGGCGTGCACACCTTCCCGGCTGTCCTACAGTCCTCAGGACTCTACTCCCTCAGCA
GCGTGGTGACCGTGCCCTCCAGCAGCTTGGGCACCCAGACCTACATCTGCAACGTGAATCACAAGCCCAGCAACACC
AAGGTGGACAAGAGAGTTGAGCCCAAATCTTGTGACAAAACTCACACATGCCCACCGTGCCCAGCACCTGAAGCCGC
GGGGGGACCGTCAGTCTTCCTCTTCCCCCCAAAACCCAAGGACACCCTCATGATCTCCCGGACCCCTGAGGTCACAT
GCGTGGTGGTGGACGTGAGCCACGAAGACCCTGAGGTCAAGTTCAACTGGTACGTGGACGGCGTGGAGGTGCATAAT
GCCAAGACAAAGCCGCGGGAGGAGCAGTACGCCAGCACGTACCGTGTGGTCAGCGTCCTCACCGTCCTGCACCAGGA
CTGGCTGAATGGCAAGGAGTACAAGTGCGCGGTCTCCAACAAAGCCCTCCCAGCCCCCATCGAGAAAACCATCTCCA
AAGCCAAAGGGCAGCCCCGAGAACCACAGGTGTGTACCCTGCCCCCATCCCGGGATGAGCTGACCAAGAACCAGGTC
AGCCTGTCCTGCGCCGTCAAAGGCTTCTATCCCAGCGACATCGCCGTGGAGTGGGAGAGCAATGGGCAGCCGGAGAA
CAACTACAAGACCACGCCTCCCGTGCTGGACTCCGACGGCTCCTTCTTCCTCGTGAGCAAGCTCACCGTGGACAAGA
GCAGGTGGCAGCAGGGGAACGTCTTCTCATGCTCCGTGATGCATGAGGCTCTGCACAACCACTACACGCAGAAGAGC
CTCTCCCTGTCTCCGGGTAAA
>SEQ ID 204 SI-49R22 chain C aa
FLNSLFNQEVQIPLTESYCGPCPKNWICYKNNCYQFFDESKNWYESQASCMSQNASLLKVYSKEDQDLLKLVKSYHW
MGLVHIPTNGSWQWEDGSILSPNLLTIIEMQKGDCALYASSFKGYIENCSTPNTYICMQRTVASTKGPSVFPLAPSS
KSTSGGTAALGCLVKDYFPEPVTVSWNSGALTSGVHTFPAVLQSSGLYSLSSVVTVPSSSLGTQTYICNVNHKPSNT
KVDKRVEPKSCDKTHTCPPCPAPEAAGGPSVFLFPPKPKDTLMISRTPEVTCVVVDVSHEDPEVKFNWYVDGVEVHN
AKTKPREEQYASTYRVVSVLTVLHQDWLNGKEYKCAVSNKALPAPIEKTISKAKGQPREPQVCTLPPSRDELTKNQV
SLSCAVKGFYPSDIAVEWESNGQPENNYKTTPPVLDSDGSFFLVSKLTVDKSRWQQGNVFSCSVMHEALHNHYTQKS
LSLSPGK
>SEQ ID 205 SI-49R23 chain A nt
TTTCTTAATTCCCTTTTCAACCAAGAGGTTCAGATCCCCTTGACTGAAAGCTATTGCGGCCCTTGTCCGAAAAACTG
GATATGTTACAAGAATAATTGTTACCAATTCTTCGACGAAAGCAAGAACTGGTATGAGAGTCAGGCGTCTTGTATGA
GTCAGAATGCCAGCCTGCTTAAGGTTTATTCAAAAGAAGACCAGGATCTGCTTAAGTTGGTAAAGAGCTACCACTGG
ATGGGGCTGGTACATATCCCAACGAATGGGTCATGGCAGTGGGAGGACGGTTCTATTCTGAGTCCAAATCTCCTGAC
GATCATCGAAATGCAGAAAGGGGACTGTGCCCTGTATGCATCATCCTTCAAGGGGTACATCGAGAACTGCAGTACCC
CAAATACCTACATTTGTATGCAAAGAACGGTTGCTAGCGAGCCCAAATCTTCTGACAAAACTCACACATGCCCACCG
TGCCCAGCACCTGAAGCCGCGGGGGGACCGTCAGTCTTCCTCTTCCCCCCAAAACCCAAGGACACCCTCATGATCTC
CCGGACCCCTGAGGTCACATGCGTGGTGGTGGACGTGAGCCACGAAGACCCTGAGGTCAAGTTCAACTGGTACGTGG
ACGGCGTGGAGGTGCATAATGCCAAGACAAAGCCGCGGGAGGAGCAGTACGCCAGCACGTACCGTGTGGTCAGCGTC
CTCACCGTCCTGCACCAGGACTGGCTGAATGGCAAGGAGTACAAGTGCGCGGTCTCCAACAAAGCCCTCCCAGCCCC
CATCGAGAAAACCATCTCCAAAGCCAAAGGGCAGCCCCGAGAACCACAGGTGTACACCCTGCCCCCATCCCGGGATG
AGCTGACCAAGAACCAGGTCAGCCTGACCTGCCTGGTCAAAGGCTTCTATCCCAGCGACATCGCCGTGGAGTGGGAG
AGCAATGGGCAGCCGGAGAACAACTACAAGACCACGCCTCCCGTGCTGGACTCCGACGGCTCCTTCTTCCTCTATAG
CAAGCTCACCGTGGACAAGAGCAGGTGGCAGCAGGGGAACGTCTTCTCATGCTCCGTGATGCATGAGGCTCTGCACA
ACCACTACACGCAGAAGAGCCTCTCCCTGTCTCCGGGTAAA
>SEQ ID 206 SI-49R23 chain A aa
FLNSLFNQEVQIPLTESYCGPCPKNWICYKNNCYQFFDESKNWYESQASCMSQNASLLKVYSKEDQDLLKLVKSYHW
MGLVHIPTNGSWQWEDGSILSPNLLTIIEMQKGDCALYASSFKGYIENCSTPNTYICMQRTVASEPKSSDKTHTCPP
CPAPEAAGGPSVFLFPPKPKDTLMISRTPEVTCVVVDVSHEDPEVKFNWYVDGVEVHNAKTKPREEQYASTYRVVSV
LTVLHQDWLNGKEYKCAVSNKALPAPIEKTISKAKGQPREPQVYTLPPSRDELTKNQVSLTCLVKGFYPSDIAVEWE
SNGQPENNYKTTPPVLDSDGSFFLYSKLTVDKSRWQQGNVFSCSVMHEALHNHYTQKSLSLSPGK
>SEQ ID 207 SI-49R24 chain A nt
TTTCTTAATTCCCTTTTCAACCAAGAGGTTCAGATCCCCTTGACTGAAAGCTATTGCGGCCCTTGTCCGAAAAACTG
GATATGTTACAAGAATAATTGTTACCAATTCTTCGACGAAAGCAAGAACTGGTATGAGAGTCAGGCGTCTTGTATGA
GTCAGAATGCCAGCCTGCTTAAGGTTTATTCAAAAGAAGACCAGGATCTGCTTAAGTTGGTAAAGAGCTACCACTGG
ATGGGGCTGGTACATATCCCAACGAATGGGTCATGGCAGTGGGAGGACGGTTCTATTCTGAGTCCAAATCTCCTGAC
GATCATCGAAATGCAGAAAGGGGACTGTGCCCTGTATGCATCATCCTTCAAGGGGTACATCGAGAACTGCAGTACCC
CAAATACCTACATTTGTATGCAAAGAACGGTTGCTAGCGAGCCCAAATCTTCTGACAAAACTCACACATGCCCACCG
TGCCCAGCACCTGAAGCCGCGGGGGGACCGTCAGTCTTCCTCTTCCCCCCAAAACCCAAGGACACCCTCATGATCTC
CCGGACCCCTGAGGTCACATGCGTGGTGGTGGACGTGAGCCACGAAGACCCTGAGGTCAAGTTCAACTGGTACGTGG
ACGGCGTGGAGGTGCATAATGCCAAGACAAAGCCGCGGGAGGAGCAGTACGCCAGCACGTACCGTGTGGTCAGCGTC
CTCACCGTCCTGCACCAGGACTGGCTGAATGGCAAGGAGTACAAGTGCGCGGTCTCCAACAAAGCCCTCCCAGCCCC
CATCGAGAAAACCATCTCCAAAGCCAAAGGGCAGCCCCGAGAACCACAGGTGTACACCCTGCCCCCATGTCGGGATG
AGCTGACCAAGAACCAGGTCAGCCTGTGGTGCCTGGTCAAAGGCTTCTATCCCAGCGACATCGCCGTGGAGTGGGAG
AGCAATGGGCAGCCGGAGAACAACTACAAGACCACGCCTCCCGTGCTGGACTCCGACGGCTCCTTCTTCCTCTATAG
CAAGCTCACCGTGGACAAGAGCAGGTGGCAGCAGGGGAACGTCTTCTCATGCTCCGTGATGCATGAGGCTCTGCACA
ACCACTACACGCAGAAGAGCCTCTCCCTGTCTCCGGGTAAA
>SEQ ID 208 SI-49R24 chain A aa
FLNSLFNQEVQIPLTESYCGPCPKNWICYKNNCYQFFDESKNWYESQASCMSQNASLLKVYSKEDQDLLKLVKSYHW
MGLVHIPTNGSWQWEDGSILSPNLLTIIEMQKGDCALYASSFKGYIENCSTPNTYICMQRTVASEPKSSDKTHTCPP
CPAPEAAGGPSVFLFPPKPKDTLMISRTPEVTCVVVDVSHEDPEVKFNWYVDGVEVHNAKTKPREEQYASTYRVVSV
LTVLHQDWLNGKEYKCAVSNKALPAPIEKTISKAKGQPREPQVYTLPPCRDELTKNQVSLWCLVKGFYPSDIAVEWE
SNGQPENNYKTTPPVLDSDGSFFLYSKLTVDKSRWQQGNVFSCSVMHEALHNHYTQKSLSLSPGK
>SEQ ID 209 SI-49R24 chain B nt
TTTCTTAATTCCCTTTTCAACCAAGAGGTTCAGATCCCCTTGACTGAAAGCTATTGCGGCCCTTGTCCGAAAAACTG
GATATGTTACAAGAATAATTGTTACCAATTCTTCGACGAAAGCAAGAACTGGTATGAGAGTCAGGCGTCTTGTATGA
GTCAGAATGCCAGCCTGCTTAAGGTTTATTCAAAAGAAGACCAGGATCTGCTTAAGTTGGTAAAGAGCTACCACTGG
ATGGGGCTGGTACATATCCCAACGAATGGGTCATGGCAGTGGGAGGACGGTTCTATTCTGAGTCCAAATCTCCTGAC
GATCATCGAAATGCAGAAAGGGGACTGTGCCCTGTATGCATCATCCTTCAAGGGGTACATCGAGAACTGCAGTACCC
CAAATACCTACATTTGTATGCAAAGAACGGTTGCTAGCGAGCCCAAATCTTCTGACAAAACTCACACATGCCCACCG
TGCCCAGCACCTGAAGCCGCGGGGGGACCGTCAGTCTTCCTCTTCCCCCCAAAACCCAAGGACACCCTCATGATCTC
CCGGACCCCTGAGGTCACATGCGTGGTGGTGGACGTGAGCCACGAAGACCCTGAGGTCAAGTTCAACTGGTACGTGG
ACGGCGTGGAGGTGCATAATGCCAAGACAAAGCCGCGGGAGGAGCAGTACGCCAGCACGTACCGTGTGGTCAGCGTC
CTCACCGTCCTGCACCAGGACTGGCTGAATGGCAAGGAGTACAAGTGCGCGGTCTCCAACAAAGCCCTCCCAGCCCC
CATCGAGAAAACCATCTCCAAAGCCAAAGGGCAGCCCCGAGAACCACAGGTGTGTACCCTGCCCCCATCCCGGGATG
AGCTGACCAAGAACCAGGTCAGCCTGTCCTGCGCCGTCAAAGGCTTCTATCCCAGCGACATCGCCGTGGAGTGGGAG
AGCAATGGGCAGCCGGAGAACAACTACAAGACCACGCCTCCCGTGCTGGACTCCGACGGCTCCTTCTTCCTCGTGAG
CAAGCTCACCGTGGACAAGAGCAGGTGGCAGCAGGGGAACGTCTTCTCATGCTCCGTGATGCATGAGGCTCTGCACA
ACCACTACACGCAGAAGAGCCTCTCCCTGTCTCCGGGTAAA
>SEQ ID 210 SI-49R24 chain B aa
FLNSLFNQEVQIPLTESYCGPCPKNWICYKNNCYQFFDESKNWYESQASCMSQNASLLKVYSKEDQDLLKLVKSYHW
MGLVHIPTNGSWQWEDGSILSPNLLTIIEMQKGDCALYASSFKGYIENCSTPNTYICMQRTVASEPKSSDKTHTCPP
CPAPEAAGGPSVFLFPPKPKDTLMISRTPEVTCVVVDVSHEDPEVKFNWYVDGVEVHNAKTKPREEQYASTYRVVSV
LTVLHQDWLNGKEYKCAVSNKALPAPIEKTISKAKGQPREPQVCTLPPSRDELTKNQVSLSCAVKGFYPSDIAVEWE
SNGQPENNYKTTPPVLDSDGSFFLVSKLTVDKSRWQQGNVFSCSVMHEALHNHYTQKSLSLSPGK
>SEQ ID 217 anti-claudin zolbetuximab VH nt
CAGGTCCAACTGCAGCAGCCTGGGGCTGAGCTGGTGAGGCCTGGGGCTTCAGTGAAGCTGTCCTGCAAGGCTTCTGG
CTACACCTTCACCAGCTACTGGATAAACTGGGTGAAGCAGAGGCCTGGACAAGGCCTTGAGTGGATCGGAAATATTT
ATCCTTCTGATAGTTATACTAACTACAATCAAAAGTTCAAGGACAAGGCCACATTGACTGTAGACAAATCCTCCAGC
ACAGCCTACATGCAGCTCAGCAGCCCGACATCTGAGGACTCTGCGGTCTATTACTGTACAAGATCGTGGAGGGGTAA
CTCCTTTGACTACTGGGGCCAAGGCACCACTCTCACAGTCTCCTCA
>SEQ ID 218 anti-claudin zolbetuximab VH aa
QVQLQQPGAELVRPGASVKLSCKASGYTFTSYWINWVKQRPGQGLEWIGNIYPSDSYTNYNQKFKDKATLTVDKSSS
TAYMQLSSPTSEDSAVYYCTRSWRGNSFDYWGQGTTLTVSS
>SEQ ID 219 anti-claudin zolbetuximab VL nt
GACATTGTGATGACACAGTCTCCATCCTCCCTGACTGTGACAGCAGGAGAGAAGGTCACTATGAGCTGCAAGTCCAG
TCAGAGTCTGTTAAACAGTGGAAATCAAAAGAACTACTTGACCTGGTACCAGCAGAAACCAGGGCAGCCTCCTAAAC
TGTTGATCTACTGGGCATCCACTAGGGAATCTGGGGTCCCTGATCGCTTCACAGGCAGTGGATCTGGAACAGATTTC
ACTCTCACCATCAGCAGTGTGCAGGCTGAAGACCTGGCAGTTTATTACTGTCAGAATGATTATAGTTATCCATTCAC
GTTCGGCTCGGGGACAAAGTTGGAAATAAAA
>SEQ ID 220 anti-claudin zolbetuximab VL aa
DIVMTQSPSSLTVTAGEKVTMSCKSSQSLLNSGNQKNYLTWYQQKPGQPPKLLIYWASTRESGVPDRFTGSGSGTDF
TLTISSVQAEDLAVYYCQNDYSYPFTFGSGTKLEIK
>SEQ ID 221 anti-HER2 trastuzumab VH nt
GAGGTTCAGCTGGTGGAGTCTGGCGGTGGCCTGGTGCAGCCAGGGGGCTCACTCCGTTTGTCCTGTGCAGCTTCTGG
CTTCAACATTAAAGACACCTATATACACTGGGTGCGTCAGGCCCCGGGTAAGGGCCTGGAATGGGTTGCAAGGATTT
ATCCTACGAATGGTTATACTAGATATGCCGATAGCGTCAAGGGCCGTTTCACTATAAGCGCAGACACATCCAAAAAC
ACAGCCTACCTGCAGATGAACAGCCTGCGTGCTGAGGACACTGCCGTCTATTATTGTTCTAGATGGGGAGGGGACGG
CTTCTATGCTATGGACTACTGGGGTCAAGGAACCCTGGTCACCGTCTCCTCG
>SEQ ID 222 anti-HER2 trastuzumab VH aa
[sequence omitted]
>SEQ ID 223 anti-HER2 trastuzumab VL nt
GATATCCAGATGACCCAGTCCCCGAGCTCCCTGTCCGCCTCTGTGGGCGATAGGGTCACCATCACCTGCCGTGCCAG
TCAGGATGTGAATACTGCTGTAGCCTGGTATCAACAGAAACCAGGAAAAGCTCCGAAACTACTGATTTACTCGGCAT
CCTTCCTCTACTCTGGAGTCCCTTCTCGCTTCTCTGGCTCCAGATCTGGGACGGATTTCACTCTGACCATCAGCAGT
CTGCAGCCGGAAGACTTCGCAACTTATTACTGTCAGCAACATTATACTACTCCTCCCACGTTCGGACAGGGTACCAA
GGTGGAGATCAAA
>SEQ ID 224 anti-HER2 trastuzumab VL aa
[sequence omitted]
>SEQ ID 225 anti-HER2 pertuzumab VH nt
GAAGTGCAGCTCGTCGAAAGCGGTGGCGGACTGGTTCAGCCCGGTGGTTCTCTGCGGCTGTCTTGTGCTGCCTCGGG
TTTCACGTTCACTGACTACACAATGGACTGGGTGCGTCAGGCTCCTGGAAAGGGATTGGAGTGGGTAGCCGACGTTA
ATCCAAACTCCGGCGGGAGCATCTACAACCAGAGGTTCAAGGGGAGGTTCACTCTGAGCGTGGATCGCTCCAAGAAC
ACGCTGTACCTCCAGATGAACTCTCTCAGGGCCGAGGACACGGCTGTTTACTATTGCGCGAGGAACCTGGGTCCTTC
CTTCTACTTCGACTACTGGGGACAGGGAACCCTGGTGACCGTCAGCTCC
>SEQ ID 226 anti-HER2 pertuzumab VH aa
[sequence omitted]
>SEQ ID 227 anti-HER2 pertuzumab VL nt
GACATCCAGATGACACAATCTCCTAGCAGTCTGAGCGCAAGTGTTGGAGATCGTGTCACCATCACATGCAAGGCCAG
CCAGGATGTGAGCATTGGAGTCGCCTGGTATCAGCAGAAACCCGGCAAGGCACCCAAGCTGCTGATCTACTCGGCCA
GTTACAGATACACTGGCGTACCTTCGAGGTTTAGTGGTAGCGGTTCTGGAACCGATTTCACCCTCACCATTAGCTCC
CTCCAACCCGAGGACTTCGCCACCTACTACTGCCAGCAATACTACATCTACCCTTACACGTTCGGCCAAGGCACTAA
GGTCGAGATTAAA
>SEQ ID 228 anti-HER2 pertuzumab VL aa
[sequence omitted]
>SEQ ID 229 anti-mesothelin amatuximab VH nt
CAGGTACAACTGCAGCAGTCTGGGCCTGAGCTGGAGAAGCCTGGCGCTTCAGTGAAGATATCCTGCAAGGCTTCTGG
TTACTCATTCACTGGCTACACCATGAACTGGGTGAAGCAGAGCCATGGAAAGAGCCTTGAGTGGATTGGACTTATTA
CTCCTTACAATGGTGCTTCTAGCTACAACCAGAAGTTCAGGGGCAAGGCCACATTAACTGTAGACAAGTCATCCAGC
ACAGCCTACATGGACCTCCTCAGTCTGACATCTGAAGACTCTGCAGTCTATTTCTGTGCAAGGGGGGGTTACGACGG
GAGGGGTTTTGACTACTGGGGATCTGGGACCCCGGTCACCGTCTCCTCA
>SEQ ID 230 anti-mesothelin amatuximab VH aa
QVQLQQSGPELEKPGASVKISCKASGYSFTGYTMNWVKQSHGKSLEWIGLITPYNGASSYNQKFRGKATLTVDKSSS
TAYMDLLSLTSEDSAVYFCARGGYDGRGFDYWGSGTPVTVSS
>SEQ ID 231 anti-mesothelin amatuximab VL nt
GACATCGAGCTCACTCAGTCTCCAGCAATCATGTCTGCATCTCCAGGGGAGAAGGTCACCATGACCTGCAGTGCCAG
CTCAAGTGTAAGTTACATGCACTGGTACCAGCAGAAGTCAGGCACCTCCCCCAAAAGATGGATTTATGACACATCCA
AACTGGCTTCTGGAGTCCCAGGTCGCTTCAGTGGCAGTGGGTCTGGAAACTCTTACTCTCTCACAATCAGCAGCGTG
GAGGCTGAAGATGATGCAACTTATTACTGCCAGCAGTGGAGTAAGCACCCTCTCACGTTCGGATCCGGGACCAAGGT
GGAAATCAAA
>SEQ ID 232 anti-mesothelin amatuximab VL aa
DIELTQSPAIMSASPGEKVTMTCSASSSVSYMHWYQQKSGTSPKRWIYDTSKLASGVPGRFSGSGSGNSYSLTISSV
EAEDDATYYCQQWSKHPLTFGSGTKVEIK
>SEQ ID 233 anti-GD2 dinutuximab VH nt
GAGGTCCAACTGCTGCAGTCTGGACCTGAGCTGGAGAAGCCTGGCGCTTCAGTGATGATATCCTGCAAGGCTTCTGG
TTCCTCATTCACTGGCTACAACATGAACTGGGTGAGGCAGAACATTGGAAAGAGCCTTGAATGGATTGGAGCTATTG
ATCCTTACTATGGTGGAACTAGCTACAACCAGAAGTTCAAGGGCAGGGCCACATTGACTGTAGACAAATCGTCCAGC
ACAGCCTACATGCACCTCAAGAGCCTGACATCTGAGGACTCTGCAGTCTATTACTGTGTAAGCGGAATGGAGTACTG
GGGTCAAGGAACCTCAGTCACCGTCTCCTCA
>SEQ ID 234 anti-GD2 dinutuximab VH aa
[sequence omitted]
>SEQ ID 235 anti-GD2 dinutuximab VL nt
GAAATAGTGATGACGCAGTCTCCAGCCACCCTGTCTGTGTCTCCAGGGGAAAGAGCCACCCTCTCCTGCAGATCTAG
TCAGAGTCTTGTACACCGTAATGGAAACACCTATTTACATTGGTACCTGCAGAAGCCAGGCCAGTCTCCAAAGCTCC
TGATTCACAAAGTTTCCAACCGATTTTCTGGGGTCCCAGACAGGTTCAGTGGCAGTGGATCAGGGACAGATTTCACA
CTCAAGATCAGCAGAGTGGAGGCTGAGGATCTGGGAGTTTATTTCTGTTCTCAAAGTACACATGTTCCTCCGCTCAC
GTTCGGTGCTGGGACCAAGCTGGAGCTGAAA
>SEQ ID 236 anti-GD2 dinutuximab VL aa
[sequence omitted]
>SEQ ID 237 anti-CD20 rituximab VH nt
CAGGTGCAGCTGCAGCAGCCCGGCGCCGAGCTGGTGAAGCCCGGCGCCAGCGTGAAGATGAGCTGCAAGGCCAGCGG
CTACACCTTCACCAGCTACAACATGCACTGGGTGAAGCAGACCCCCGGCCGGGGCCTGGAGTGGATCGGCGCCATCT
ACCCCGGCAACGGCGACACCAGCTACAACCAGAAGTTCAAGGGCAAGGCCACCCTGACCGCCGACAAGAGCAGCAGC
ACCGCCTACATGCAGCTGAGCAGCCTGACCAGCGAGGACAGCGCCGTGTACTACTGCGCCCGGAGCACCTACTACGG
CGGCGACTGGTACTTCAACGTGTGGGGCGCCGGCACCACCGTGACCGTGAGCGCC
>SEQ ID 238 anti-CD20 rituximab VH aa
[sequence omitted]
>SEQ ID 239 anti-CD20 rituximab VL nt
CAGATCGTGCTGAGCCAGAGCCCCGCCATCCTGAGCGCCAGCCCCGGCGAGAAGGTGACCATGACCTGCCGGGCCAG
CAGCAGCGTGAGCTACATCCACTGGTTCCAGCAGAAGCCCGGCAGCAGCCCCAAGCCCTGGATCTACGCCACCAGCA
ACCTGGCCAGCGGCGTGCCCGTGCGGTTCAGCGGCAGCGGCAGCGGCACCAGCTACAGCCTGACCATCAGCCGGGTG
GAGGCCGAGGACGCCGCCACCTACTACTGCCAGCAGTGGACCAGCAACCCCCCCACCTTCGGCGGCGGCACCAAGCT
GGAGATCAAG
>SEQ ID 240 anti-CD20 rituximab VL aa
[sequence omitted]
>SEQ ID 241 anti-EGFR cetuximab VH nt
CAGGTGCAGCTGAAGCAGTCAGGACCTGGCCTAGTGCAGCCCTCACAGAGCCTGTCCATCACCTGCACAGTCTCTGG
TTTCTCATTAACTAACTATGGTGTACACTGGGTTCGCCAGTCTCCAGGAAAGGGTCTGGAGTGGCTGGGAGTGATAT
GGAGTGGTGGAAACACAGACTATAATACACCTTTCACATCCAGACTGAGCATCAACAAGGACAATTCCAAGAGCCAA
GTTTTCTTTAAAATGAACAGTCTGCAATCTAATGACACAGCCATATATTACTGTGCCAGAGCCCTCACCTACTATGA
TTACGAGTTTGCTTACTGGGGCCAAGGGACTCTGGTCACTGTCTCTAGC
>SEQ ID 242 anti-EGFR cetuximab VH aa
QVQLKQSGPGLVQPSQSLSITCTVSGFSLTNYGVHWVRQSPGKGLEWLGVIWSGGNTDYNTPFTSRLSINKDNSKSQ
VFFKMNSLQSNDTAIYYCARALTYYDYEFAYWGQGTLVTVSS
>SEQ ID 243 anti-EGFR cetuximab VL nt
GACATCTTGCTGACTCAGTCTCCAGTCATCCTGTCTGTGAGTCCAGGAGAAAGAGTCAGTTTCTCCTGCAGGGCCAG
TCAGAGTATTGGCACAAACATACACTGGTATCAGCAAAGAACAAATGGTTCTCCAAGGCTTCTCATAAAGTATGCTT
CTGAGTCTATCTCTGGGATTCCTTCCAGGTTTAGTGGCAGTGGATCAGGGACAGATTTTACTCTTAGCATCAACAGT
GTGGAGTCTGAAGATATTGCAGATTATTACTGTCAACAAAATAATAACTGGCCAACCACGTTCGGTGCTGGGACCAA
GCTGGAGCTGAAA
>SEQ ID 244 anti-EGFR cetuximab VL aa
DILLTQSPVILSVSPGERVSFSCRASQSIGTNIHWYQQRTNGSPRLLIKYASESISGIPSRFSGSGSGTDFTLSINS
VESEDIADYYCQQNNNWPTTFGAGTKLELK
>SEQ ID 245 anti-EGFR panitumumab VH nt
CAGGTGCAGCTGCAGGAGTCGGGCCCAGGACTGGTGAAGCCTTCGGAGACCCTGTCCCTCACCTGCACTGTCTCTGG
TGGCTCCGTCAGCAGTGGTGATTACTACTGGACCTGGATCCGGCAGTCCCCAGGGAAGGGACTGGAGTGGATTGGAC
ACATCTATTACAGTGGGAACACCAATTATAACCCCTCCCTCAAGAGCCGACTCACCATATCAATTGACACGTCCAAG
ACTCAGTTCTCCCTGAAGCTGAGTTCTGTGACCGCTGCGGACACGGCCATTTATTACTGTGTGCGAGATCGAGTGAC
TGGTGCTTTTGATATCTGGGGCCAAGGGACAATGGTCACCGTCTCGAGC
>SEQ ID 246 anti-EGFR panitumumab VH aa
[sequence omitted]
>SEQ ID 247 anti-EGFR panitumumab VL nt
GACATCCAGATGACCCAGTCTCCATCCTCCCTGTCTGCATCTGTAGGAGACAGAGTCACCATCACTTGCCAGGCGAG
TCAGGACATCAGCAACTATTTAAATTGGTATCAGCAGAAACCAGGGAAAGCCCCTAAACTCCTGATCTACGATGCAT
CCAATTTGGAAACAGGGGTCCCATCAAGGTTCAGTGGAAGTGGATCTGGGACAGATTTTACTTTCACCATCAGCAGC
CTGCAGCCTGAAGATATTGCAACATATTTCTGTCAACACTTTGATCATCTCCCGCTCGCTTTCGGCGGAGGGACCAA
GGTGGAAATTAAA
>SEQ ID 248 anti-EGFR panitumumab VL aa
[sequence omitted]
>SEQ ID 249 anti-EGFR nimotuzumab VH nt
CAGGTGCAGCTGCAGCAGAGCGGCGCCGAGGTGAAGAAGCCCGGCAGCAGCGTGAAGGTGAGCTGCAAGGCCAGCGG
CTACACCTTCACCAACTACTACATCTACTGGGTGCGGCAGGCCCCCGGCCAGGGCCTGGAGTGGATCGGCGGCATCA
ACCCCACCAGCGGCGGCAGCAACTTCAACGAGAAGTTCAAGACCCGGGTGACCATCACCGCCGACGAGAGCAGCACC
ACCGCCTACATGGAGCTGAGCAGCCTGCGGAGCGAGGACACCGCCTTCTACTTCTGCACCCGGCAGGGCCTGTGGTT
CGACAGCGACGGCCGGGGCTTCGACTTCTGGGGCCAGGGCACCACCGTGACCGTGAGCAGC
>SEQ ID 250 anti-EGFR nimotuzumab VH aa
[sequence omitted]
>SEQ ID 251 anti-EGFR nimotuzumab VL nt
GATATTCAAATGACTCAATCTCCTTCTTCTCTTTCTGCTTCTGTTGGTGATCGTGTTACTATTACTTGTCGTTCTTC
TCAAAATATTGTTCATTCTAATGGTAATACTTATCTTGATTGGTATCAACAAACTCCTGGTAAAGCTCCTAAACTTC
TTATTTATAAAGTTTCTAATCGTTTTTCTGGTGTTCCTTCTCGTTTTTCTGGTTCTGGTTCTGGTACTGATTTTACT
TTTACTATTTCTTCTCTTCAACCTGAAGATATTGCTACTTATTATTGTTTTCAATATTCTCATGTTCCTTGGACTTT
TGGTCAAGGTACTAAACTTCAAATTACT
>SEQ ID 252 anti-EGFR nimotuzumab VL aa
[sequence omitted]
>SEQ ID 253 anti-CD22 inotuzumab VH nt
GAGGTGCAATTGGTCCAGTCAGGAGCAGAGGTTAAGAAGCCTGGTGCTTCCGTCAAAGTTTCGTGTAAGGCCAGCGG
CTACAGGTTCACAAATTATTGGATTCATTGGGTCAGGCAGGCTCCGGGACAAGGCCTGGAATGGATCGGTGGCATTA
ATCCCGGGAATAACTACGCTACATATAGGAGAAAATTCCAGGGCAGAGTTACGATGACCGCGGACACCTCCACAAGC
ACTGTCTACATGGAGCTGTCATCTCTGAGATCCGAGGACACCGCAGTGTACTATTGTACTAGAGAAGGCTACGGTAA
TTACGGAGCCTGGTTCGCCTACTGGGGCCAGGGTACCCTAGTCACAGTCTCCTCA
>SEQ ID 254 anti-CD22 inotuzumab VH aa
EVQLVQSGAEVKKPGASVKVSCKASGYRFTNYWIHWVRQAPGQGLEWIGGINPGNNYATYRRKFQGRVTMTADTSTS
TVYMELSSLRSEDTAVYYCTREGYGNYGAWFAYWGQGTLVTVSS
>SEQ ID 255 anti-CD22 inotuzumab VL nt
GACGTTCAAGTGACCCAGAGCCCATCCAGCCTGAGCGCATCTGTAGGAGACCGGGTCACCATCACTTGTAGATCCAG
TCAGAGTCTTGCAAACAGTTATGGGAACACCTTTTTGTCTTGGTATCTGCACAAACCAGGTAAAGCCCCACAATTGC
TCATCTACGGAATCTCTAACAGATTTAGTGGTGTACCAGACAGGTTCAGCGGTTCCGGAAGTGGTACTGATTTCACC
CTCACGATCTCGTCTCTCCAGCCAGAAGATTTCGCCACTTATTACTGTTTACAAGGTACACATCAGCCGTACACATT
CGGTCAGGGTACTAAAGTAGAAATCAAA
>SEQ ID 256 anti-CD22 inotuzumab VL aa
DVQVTQSPSSLSASVGDRVTITCRSSQSLANSYGNTFLSWYLHKPGKAPQLLIYGISNRFSGVPDRFSGSGSGTDFT
LTISSLQPEDFATYYCLQGTHQPYTFGQGTKVEIK
>SEQ ID 257 anti-CD30 brentuximab VH nt
CAGATCCAGCTGCAGCAGTCTGGACCTGAGGTGGTGAAGCCTGGGGCTTCAGTGAAGATATCCTGCAAGGCTTCTGG
CTACACCTTCACTGACTACTATATAACCTGGGTGAAGCAGAAGCCTGGACAGGGACTTGAGTGGATTGGATGGATTT
ATCCTGGAAGCGGTAATACTAAGTACAATGAGAAGTTCAAGGGCAAGGCCACATTGACTGTAGACACATCCTCCAGC
ACAGCCTTCATGCAGCTCAGCAGCCTGACATCTGAGGACACTGCTGTCTATTTCTGTGCGAACTATGGTAACTACTG
GTTTGCTTACTGGGGCCAAGGGACTCAGGTCACTGTCTCTGCA
>SEQ ID 258 anti-CD30 brentuximab VH aa
QIQLQQSGPEVVKPGASVKISCKASGYTETDYYITWVKQKPGQGLEWIGWIYPGSGNTKYNEKFKGKATLTVDTSSS
TAFMQLSSLTSEDTAVYFCANYGNYWFAYWGQGTQVTVSA
>SEQ ID 259 anti-CD30 brentuximab VL nt
GACATTGTGCTGACCCAATCTCCAGCTTCTTTGGCTGTGTCTCTAGGGCAGAGGGCCACCATCTCCTGCAAGGCCAG
CCAAAGTGTTGATTTTGATGGTGATAGTTATATGAACTGGTACCAACAGAAACCAGGACAGCCACCCAAAGTCCTCA
TCTATGCTGCATCCAATCTAGAATCTGGGATCCCAGCCAGGTTTAGTGGCAGTGGGTCTGGGACAGACTTCACCCTC
AACATCCATCCTGTGGAGGAGGAGGATGCTGCAACCTATTACTGTCAGCAAAGTAATGAGGATCCGTGGACGTTCGG
TGGAGGCACCAAGCTGGAAATCAAA
>SEQ ID 260 anti-CD30 brentuximab VL aa
DIVLTQSPASLAVSLGQRATISCKASQSVDFDGDSYMNWYQQKPGQPPKVLIYAASNLESGIPARFSGSGSGTDFTL
NIHPVEEEDAATYYCQQSNEDPWTFGGGTKLEIK
>SEQ ID 261 anti-HER3 MM-111 VH nt
CAGGTGCAATTGCAGGAGTCGGGGGGAGGCCTGGTCAAGCCTGGAGGGTCCCTGAGACTCTCCTGTGCAGCCTCTGG
ATTCACCTTTAGTAGTTATTGGATGAGCTGGGTCCGCCAGGCTCCAGGGAAGGGGCTGGAGTGGGTGGCCAACATAA
ACCGCGATGGAAGTGCGAGTTACTATGTGGACTCTGTGAAGGGCCGATTCACCATCTCCAGAGACGACGCCAAGAAC
TCACTGTATCTGCAAATGAACAGCCTGAGAGCTGAGGACACGGCTGTGTATTACTGTGCGAGAGATCGTGGGGTGGG
CTACTTCGATCTCTGGGGCCGTGGCACCCTGGTCACCGTCTCGAGC
>SEQ ID 262 anti-HER3 MM-111 VH aa
QVQLQESGGGLVKPGGSLRLSCAASGFTFSSYWMSWVRQAPGKGLEWVANINRDGSASYYVDSVKGRFTISRDDAKN
SLYLQMNSLRAEDTAVYYCARDRGVGYFDLWGRGTLVTVSS
>SEQ ID 263 anti-HER3 MM-111 VL nt
CAGTCTGCCCTGACTCAGCCTGCCTCCGTGTCTGGGTCTCCTGGACAGTCGATCACCATCTCCTGCACTGGAACCAG
CAGTGACGTTGGTGGTTATAACTTTGTCTCCTGGTACCAACAACACCCAGGCAAAGCCCCCAAACTCATGATCTATG
ATGTCAGTGATCGGCCCTCAGGGGTGTCTGATCGCTTCTCCGGCTCCAAGTCTGGCAACACGGCCTCCCTGATCATC
TCTGGCCTCCAGGCTGACGACGAGGCTGATTATTACTGCAGCTCATATGGGAGCAGCAGCACTCATGTGATTTTCGG
CGGAGGGACCAAGGTGACCGTCCTA
>SEQ ID 264 anti-HER3 MM-111 VL aa
QSALTQPASVSGSPGQSITISCTGTSSDVGGYNFVSWYQQHPGKAPKLMIYDVSDRPSGVSDRFSGSKSGNTASLII
SGLQADDEADYYCSSYGSSSTHVIFGGGTKVTVL
>SEQ ID 265 anti-EGFRvIII ABT-806 VH nt
GATGTGCAGCTTCAGGAGTCGGGACCTAGCCTGGTGAAACCTTCTCAGTCTCTGTCCCTCACCTGCACTGTCACTGG
CTACTCAATCACCAGTGATTTTGCCTGGAACTGGATTCGGCAGTTTCCAGGAAACAAGCTGGAGTGGATGGGCTACA
TAAGTTATAGTGGTAACACTAGGTACAACCCATCTCTCAAAAGTCGAATCTCTATCACTCGCGACACATCCAAGAAC
CAATTCTTCCTGCAGTTGAACTCTGTGACTATTGAGGACACAGCCACATATTACTGTGTAACGGCGGGACGCGGGTT
TCCTTATTGGGGCCAAGGGACTCTGGTCACTGTCTCTGCA
>SEQ ID 266 anti-EGFRvIII ABT-806 VH aa
DVQLQESGPSLVKPSQSLSLTCTVTGYSITSDFAWNWIRQFPGNKLEWMGYISYSGNTRYNPSLKSRISITRDTSKN
QFFLQLNSVTIEDTATYYCVTAGRGFPYWGQGTLVTVSA
>SEQ ID 267 anti-EGFRvIII ABT-806 VL nt
GACATCCTGATGACCCAATCTCCATCCTCCATGTCTGTATCTCTGGGAGACACAGTCAGCATCACTTGCCATTCAAG
TCAGGACATTAACAGTAATATAGGGTGGTTGCAGCAGAGACCAGGGAAATCATTTAAGGGCCTGATCTATCATGGAA
CCAACTTGGACGATGAAGTTCCATCAAGGTTCAGTGGCAGTGGATCTGGAGCCGATTATTCTCTCACCATCAGCAGC
CTGGAATCTGAAGATTTTGCAGACTATTACTGTGTACAGTATGCTCAGTTTCCGTGGACGTTCGGTGGAGGCACCAA
GCTGGAAATCAAA
>SEQ ID 268 anti-EGFRvIII ABT-806 VL aa
DILMTQSPSSMSVSLGDTVSITCHSSQDINSNIGWLQQRPGKSFKGLIYHGTNLDDEVPSRFSGSGSGADYSLTISS
LESEDFADYYCVQYAQFPWTFGGGTKLEIK
>SEQ ID 269 anti-CD19 21D4 VH nt
GAGGTGCAGCTGGTGCAGTCTGGAGCAGAGGTGAAGAAACCAGGAGAGTCTCTGAAGATCTCCTGTAAGGGTTCTGG
ATACAGCTTTAGCAGTTCATGGATCGGCTGGGTGCGCCAGGCACCTGGGAAAGGCCTGGAATGGATGGGGATCATCT
ATCCTGATGACTCTGATACCAGATACAGTCCATCCTTCCAAGGCCAGGTCACCATCTCAGCCGACAAGTCCATCAGG
ACTGCCTACCTGCAGTGGAGTAGCCTGAAGGCCTCGGACACCGCTATGTATTACTGTGCGAGACATGTTACTATGAT
TTGGGGAGTTATTATTGACTTCTGGGGCCAGGGAACCCTGGTCACCGTCTCCTCA
>SEQ ID 270 anti-CD19 21D4 VH aa
EVQLVQSGAEVKKPGESLKISCKGSGYSFSSSWIGWVRQAPGKGLEWMGIIYPDDSDTRYSPSFQGQVTISADKSIR
TAYLQWSSLKASDTAMYYCARHVTMIWGVIIDFWGQGTLVTVSS
>SEQ ID 271 anti-CD19 21D4 VL nt
GCCATCCAGTTGACCCAGTCTCCATCCTCCCTGTCTGCATCTGTAGGAGACAGAGTCACCATCACTTGCCGGGCAAG
TCAGGGCATTAGCAGTGCTTTAGCCTGGTATCAGCAGAAACCAGGGAAAGCTCCTAAGCTCCTGATCTATGATGCCT
CCAGTTTGGAAAGTGGGGTCCCATCAAGGTTCAGCGGCAGTGGATCTGGGACAGATTTCACTCTCACCATCAGCAGC
CTGCAGCCTGAAGATTTTGCAACTTATTACTGTCAACAGTTTAATAGTTACCCATTCACTTTCGGCCCTGGGACCAA
AGTGGATATCAAA
>SEQ ID 272 anti-CD19 21D4 VL aa
AIQLTQSPSSLSASVGDRVTITCRASQGISSALAWYQQKPGKAPKLLIYDASSLESGVPSRFSGSGSGTDFTLTISS
LQPEDFATYYCQQFNSYPFTFGPGTKVDIK
>SEQ ID 273 anti-CD33 gemtuzumab VH nt
GAGGTCCAATTGGTACAATCCGGCGCTGAGGTTAAGAAACCGGGTTCCTCAGTCAAAGTTAGTTGTAAGGCATCAGG
TTACACGATCACTGATAGTAACATACATTGGGTGAGACAGGCTCCTGGGCAGTCCCTTGAGTGGATTGGATACATTT
ATCCATATAATGGCGGCACGGATTACAACCAGAAATTTAAGAATAGAGCGACACTGACCGTTGACAACCCCACCAAT
ACCGCGTATATGGAATTGTCAAGCCTGAGGTCTGAGGACACGGCCTTCTACTATTGCGTAAACGGTAACCCGTGGCT
GGCCTACTGGGGGCAGGGGACACTCGTAACCGTCTCTTCT
>SEQ ID 274 anti-CD33 gemtuzumab VH aa
[sequence omitted]
>SEQ ID 275 anti-CD33 gemtuzumab VL nt
GATATACAACTTACGCAGTCTCCCTCCACTCTGTCAGCGTCCGTAGGGGACAGAGTAACGATAACATGCAGGGCCTC
AGAAAGTCTTGACAACTACGGCATAAGGTTCCTCACATGGTTTCAACAGAAGCCGGGTAAAGCACCAAAACTCCTGA
TGTATGCTGCGTCTAACCAGGGGTCCGGTGTTCCTAGTCGGTTTTCAGGCAGCGGTAGCGGTACCGAGTTCACTCTC
ACAATTTCCAGTCTTCAGCCTGACGATTTCGCAACGTATTATTGCCAACAAACTAAGGAAGTGCCTTGGAGCTTTGG
GCAAGGCACCAAGGTCGAGGTGAAG
>SEQ ID 276 anti-CD33 gemtuzumab VL aa
[sequence omitted]
>SEQ ID 277 anti-CD3 284A10 VH nt
GAGGTGCAGCTGGTGGAGTCTGGGGGAGGCTTGGTCCAGCCTGGGGGGTCCCTGAGACTCTCCTGTGCAGCCTCTGG
ATTCACCATCAGTACCAATGCAATGAGCTGGGTCCGCCAGGCTCCAGGGAAGGGGCTGGAGTGGATCGGAGTCATTA
CTGGTCGTGATATCACATACTACGCGAGCTGGGCGAAAGGCAGATTCACCATCTCCAGAGACAATTCCAAGAACACG
CTGTATCTTCAAATGAACAGCCTGAGAGCCGAGGACACGGCTGTGTATTACTGTGCGAGAGACGGTGGTTCTTCTGC
TATTACTAGTAACAACATTTGGGGCCAGGGAACCCTGGTCACCGTGTCGACA
>SEQ ID 278 anti-CD3 284A10 VH aa
EVQLVESGGGLVQPGGSLRLSCAASGFTISTNAMSWVRQAPGKGLEWIGVITGRDITYYASWAKGRFTISRDNSKNT
LYLQMNSLRAEDTAVYYCARDGGSSAITSNNIWGQGTLVTVST
>SEQ ID 279 anti-CD3 284A10 VL nt
GACGTCGTGATGACCCAGTCTCCTTCCACCCTGTCTGCATCTGTAGGAGACAGAGTCACCATCAATTGCCAAGCCAG
TGAGAGCATTAGCAGTTGGTTAGCCTGGTATCAGCAGAAACCAGGGAAAGCCCCTAAGCTCCTGATCTATGAAGCAT
CCAAACTGGCATCTGGGGTCCCATCAAGGTTCAGCGGCAGTGGATCTGGGACAGAATTTACTCTCACCATCAGCAGC
CTGCAGCCTGATGATTTTGCAACTTATTACTGCCAAGGCTATTTTTATTTTATTAGTCGTACTTATGTAAATTCTTT
CGGCGGAGGGACCAAGGTGGAGATCAAA
>SEQ ID 280 anti-CD3 284A10 VL aa
DVVMTQSPSTLSASVGDRVTINCQASESISSWLAWYQQKPGKAPKLLIYEASKLASGVPSRFSGSGSGTEFTLTISS
LQPDDFATYYCQGYFYFISRTYVNSFGGGTKVEIK
>SEQ ID 281 anti-PD-L1 PL221G5 VH nt
GAGGTGCAGCTGTTGGAGTCTGGGGGAGGCTTGGTACAGCCTGGGGGGTCCCTGAGACTCTCCTGTGCAGCCTCTGG
ATTCTCCTTCAGTAGCGGGTACGACATGTGCTGGGTCCGCCAGGCTCCAGGGAAGGGGCTGGAGTGGATCGCATGCA
TTGCTGCTGGTAGTGCTGGTATCACTTACGACGCGAACTGGGCGAAAGGCCGGTTCACCATCTCCAGAGACAATTCC
AAGAACACGCTGTATCTGCAAATGAACAGCCTGAGAGCCGAGGACACGGCCGTATATTACTGTGCGAGATCGGCGTT
TTCGTTCGACTACGCCATGGACCTCTGGGGCCAGGGAACCCTGGTCACCGTCTCGAGC
>SEQ ID 282 anti-PD-L1 PL221G5 VH aa
EVQLLESGGGLVQPGGSLRLSCAASGFSFSSGYDMCWVRQAPGKGLEWIACIAAGSAGITYDANWAKGRFTISRDNS
KNTLYLQMNSLRAEDTAVYYCARSAFSFDYAMDLWGQGTLVTVSS
>SEQ ID 283 anti-PD-L1 PL221G5 VL nt
GACATCCAGATGACCCAGTCTCCTTCCACCCTGTCTGCATCTGTAGGAGACAGAGTCACCATCACTTGCCAGGCCAG
TCAGAGCATTAGTTCCCACTTAAACTGGTATCAGCAGAAACCAGGGAAAGCCCCTAAGCTCCTGATCTATAAGGCAT
CCACTCTGGCATCTGGGGTCCCATCAAGGTTCAGCGGCAGTGGATCTGGGACAGAATTTACTCTCACCATCAGCAGC
CTGCAGCCTGATGATTTTGCAACTTATTACTGCCAACAGGGTTATAGTTGGGGTAATGTTGATAATGTTTTCGGCGG
AGGGACCAAGGTGGAGATCAAA
>SEQ ID 284 anti-PD-L1 PL221G5 VL aa
DIQMTQSPSTLSASVGDRVTITCQASQSISSHLNWYQQKPGKAPKLLIYKASTLASGVPSRFSGSGSGTEFTLTISS
LQPDDFATYYCQQGYSWGNVDNVFGGGTKVEIK
>SEQ ID 285 anti-4-1BB 466F6 VH nt
CGGTCGCTGGTGGAGTCTGGGGGAGGCTTGGTCCAGCCTGGGGGGTCCCTGAGACTCTCCTGTACTGCCTCTGGATT
CACCATCAGTAGCTACCACATGCAGTGGGTCCGCCAGGCTCCAGGGAAGGGGCTGGAGTACATCGGAACCATTAGTA
GTGGTGGTAATGTATACTACGCAAGCTCCGCTAGAGGCAGATTCACCATCTCCAGACCCTCGTCCAAGAACACGGTG
GATCTTCAAATGAACAGCCTGAGAGCCGAGGACACGGCTGTGTATTACTGTGCGAGAGACTCTGGTTATAGTGATCC
TATGTGGGGCCAGGGAACCCTGGTCACCGTCTCTTCA
>SEQ ID 286 anti-4-1BB 466F6 VH aa
RSLVESGGGLVQPGGSLRLSCTASGFTISSYHMQWVRQAPGKGLEYIGTISSGGNVYYASSARGRFTISRPSSKNTV
DLQMNSLRAEDTAVYYCARDSGYSDPMWGQGTLVTVSS
>SEQ ID 287 anti-4-1BB 466F6 VL nt
GACGTTGTGATGACCCAGTCTCCATCTTCCGTGTCTGCATCTGTAGGAGACAGAGTCACCATCACCTGTCAGGCCAG
TCAGAACATTAGGACTTACTTATCCTGGTATCAGCAGAAACCAGGGAAAGCCCCTAAGCTCCTGATCTATGCTGCAG
CCAATCTGGCATCTGGGGTCCCATCAAGGTTCAGCGGCAGTGGATCTGGGACAGATTTCACTCTCACCATCAGCGAC
CTGGAGCCTGGCGATGCTGCAACTTACTATTGTCAGTCTACCTATCTTGGTACTGATTATGTTGGCGGTGCTTTCGG
CGGAGGGACCAAGGTGGAGATCAAA
>SEQ ID 288 anti-4-1BB 466F6 VL aa
DWMTQSPSSVSASVGDRVTITCQASQNIRTYLSWYQQKPGKAPKLLIYAAANLASGVPSRFSGSGSGTDFTLTISD
LEPGDAATYYCQSTYLGTDYVGGAFGGGTKVEIK
>SEQ ID 289 anti-CD19 SI-BU12 VH nt
CAGGTCACATTGAAGGAATCTGGCCCCGGCCTTGTTCAGCCAGGACAGACCCTTAGCCTCACCTGTGCCTTCAGTGG
TTTTTCTCTTAGCACTAGCGGTATGGGGGTCGGCTGGATTCGGCAGCCTCCCGGCAAAGGTCTTGAGTGGTTGGCTC
ACATTTGGTGGGACGACGACAAACGGTATAATCCTGCCTTGAAAAGTCGGCTGACCATTAGTAAGGATACCTCAAAA
AATCAAGTGTACTTGCAAATGAATAGCCTTGACGCCGAGGATACGGCTGTATATTATTGCGCTCGGATGGAACTCTG
GTCTTACTACTTTGATTATTGGGGGCAGGGGACTCTCGTCACGGTCTCGAGT
>SEQ ID 290 anti-CD19 SI-BU12 VH aa
QVTLKESGPGLVQPGQTLSLTCAFSGFSLSTSGMGVGWIRQPPGKGLEWLAHIWWDDDKRYNPALKSRLTISKDTSK
NQVYLQMNSLDAEDTAVYYCARMELWSYYFDYWGQGTLVTVSS
>SEQ ID 291 anti-CD19 SI-BU12 VL nt
GAAAATGTATTGACACAGAGCCCCGCCTCCCTCAGTGCCTCACCTGGGGAAAGGGTAACTATCACTTGCTCTGCATC
AAGCAGCGTCTCATACATGCATTGGTATCAACAAAAGCCTGGACAGGCCCCCAAGCTCTGGATATACGATACGAGCA
AGCTGGCTTCCGGCGTACCTAGCCGCTTCAGTGGTTCCGGCTCAGGCAACGATCACACCCTTACGATTTCCAGTATG
GAACCCGAAGATTTTGCAACTTATTATTGTTTCCAGGGGAGCGTGTACCCATTCACTTTCGGGCAGGGGACAAAAGT
GACCGTCCTA
>SEQ ID 292 anti-CD19 SI-BU12 VL aa
ENVLTQSPASLSASPGERVTITCSASSSVSYMHWYQQKPGQAPKLWIYDTSKLASGVPSRFSGSGSGNDHTLTISSM
EPEDFATYYCFQGSVYPFTFGQGTKVTVL
>SEQ ID 293 NKG2D nt
TTTCTTAATTCCCTTTTCAACCAAGAGGTTCAGATCCCCTTGACTGAAAGCTATTGCGGCCCTTGTCCGAAAAACTG
GATATGTTACAAGAATAATTGTTACCAATTCTTCGACGAAAGCAAGAACTGGTATGAGAGTCAGGCGTCTTGTATGA
GTCAGAATGCCAGCCTGCTTAAGGTTTATTCAAAAGAAGACCAGGATCTGCTTAAGTTGGTAAAGAGCTACCACTGG
ATGGGGCTGGTACATATCCCAACGAATGGGTCATGGCAGTGGGAGGACGGTTCTATTCTGAGTCCAAATCTCCTGAC
GATCATCGAAATGCAGAAAGGGGACTGTGCCCTGTATGCATCATCCTTCAAGGGGTACATCGAGAACTGCAGTACCC
CAAATACCTACATTTGTATGCAAAGAACGGTT
>SEQ ID 294 NKG2D aa
FLNSLFNQEVQIPLTESYCGPCPKNWICYKNNCYQFFDESKNWYESQASCMSQNASLLKVYSKEDQDLLKLVKSYHW
MGLVHIPTNGSWQWEDGSILSPNLLTIIEMQKGDCALYASSFKGYIENCSTPNTYICMQRTV
>SEQ ID 295 4-1BB ligand nt
CGAGAGGGCCCCGAGCTGTCTCCTGATGACCCAGCAGGCCTCTTGGACTTGCGGCAGGGTATGTTCGCTCAACTTGT
GGCTCAGAATGTTCTGCTCATTGATGGACCACTCTCTTGGTATAGTGACCCCGGTCTGGCCGGGGTGAGTCTGACCG
GCGGGCTCTCTTATAAAGAGGATACTAAGGAACTGGTCGTAGCAAAAGCGGGCGTTTATTACGTTTTTTTTCAGCTG
GAGCTCAGGCGCGTGGTGGCCGGCGAGGGCAGTGGCTCTGTGTCCCTGGCCCTGCACTTACAGCCCTTGAGAAGCGC
TGCAGGTGCTGCCGCACTGGCTTTAACTGTTGACCTCCCTCCGGCCTCTTCTGAAGCTAGAAACAGCGCTTTCGGCT
TCCAAGGGCGCCTGCTGCACCTGAGCGCAGGCCAGCGCTTAGGTGTGCACCTTCATACAGAGGCCAGGGCCCGACAC
GCTTGGCAGCTCACACAGGGTGCCACGGTTCTCGGACTTTTCCGCGTTACTCCCGAGATCCCCGCTGGCCTCGGAAG
TACTGGTTCTGGGTCTAAACCCGGTTCCGGCGAAGGTAGTACTAAAGGACGAGAAGGGCCAGAGTTAAGTCCAGATG
ACCCTGCTGGGCTTTTGGACCTGCGGCAGGGCATGTTCGCTCAACTGGTGGCTCAGAACGTGCTGCTGATCGATGGC
CCCCTGAGTTGGTACAGCGATCCCGGGCTGGCAGGCGTGTCACTTACAGGGGGCCTCTCTTACAAGGAAGACACCAA
GGAGTTAGTGGTCGCTAAGGCTGGCGTGTATTACGTGTTCTTCCAACTGGAGCTGAGAAGGGTTGTGGCAGGAGAGG
GTAGCGGCAGCGTGTCTTTAGCCCTTCACTTGCAGCCCCTGAGGTCTGCTGCAGGTGCAGCCGCTCTCGCGCTCACC
GTGGATCTCCCCCCAGCCTCATCTGAAGCTAGGAACAGTGCATTTGGCTTTCAGGGACGCTTGCTGCACCTCTCCGC
TGGACAGAGGCTGGGCGTGCACCTTCACACAGAGGCCCGTGCCAGGCATGCATGGCAGCTCACTCAGGGGGCAACAG
TGCTGGGTCTCTTCCGCGTGACTCCTGAAATACCAGCTGGACTTGGCGGTGGAGGCAGCGGCGGAGGAGGATCTCGT
GAGGGGCCAGAACTGTCCCCCGATGACCCAGCCGGACTGCTCGATCTCAGACAGGGCATGTTCGCTCAGCTTGTAGC
CCAAAATGTCCTCCTGATTGACGGCCCTTTGAGCTGGTATAGTGATCCCGGCTTGGCCGGGGTATCTCTGACCGGAG
GCCTCTCCTACAAGGAAGACACCAAAGAGCTGGTGGTGGCAAAAGCGGGGGTGTATTATGTGTTCTTTCAGCTCGAG
CTGCGGAGAGTTGTGGCCGGGGAAGGGTCTGGGAGCGTATCTCTTGCACTTCACCTGCAGCCCCTGCGCAGCGCCGC
TGGAGCCGCCGCCCTTGCTCTTACTGTGGATCTGCCTCCTGCTTCCTCAGAAGCACGCAACAGCGCCTTCGGCTTTC
AAGGACGTCTCCTGCACTTGTCCGCAGGACAGAGGTTGGGCGTCCATTTACACACTGAGGCACGGGCACGGCACGCT
TGGCAGCTTACCCAGGGAGCCACCGTGCTGGGACTCTTTAGAGTGACACCCGAGATCCCCGCTGGCTTG
>SEQ ID 296 4-1BB ligand aa
REGPELSPDDPAGLLDLRQGMFAQLVAQNVLLIDGPLSWYSDPGLAGVSLTGGLSYKEDTKELVVAKAGVYYVFFQL
ELRRVVAGEGSGSVSLALHLQPLRSAAGAAALALTVDLPPASSEARNSAFGFQGRLLHLSAGQRLGVHLHTEARARH
AWQLTQGATVLGLFRVTPEIPAGLGSTGSGSKPGSGEGSTKGREGPELSPDDPAGLLDLRQGMFAQLVAQNVLLIDG
PLSWYSDPGLAGVSLTGGLSYKEDTKELVVAKAGVYYVFFQLELRRVVAGEGSGSVSLALHLQPLRSAAGAAALALT
VDLPPASSEARNSAFGFQGRLLHLSAGQRLGVHLHTEARARHAWQLTQGATVLGLFRVTPEIPAGLGGGGSGGGGSR
EGPELSPDDPAGLLDLRQGMFAQLVAQNVLLIDGPLSWYSDPGLAGVSLTGGLSYKEDTKELVVAKAGVYYVFFQLE
LRRVVAGEGSGSVSLALHLQPLRSAAGAAALALTVDLPPASSEARNSAFGFQGRLLHLSAGQRLGVHLHTEARARHA
WQLTQGATVLGLFRVTPEIPAGL
>SEQ ID 301 SI-55P9 chain A nt
GAAATCGTCCTTACACAATCTCCTAGCACACTGAGTGTGAGCCCCGGCGAACGCGCGACTTTCTCTTGCAGGGCAAG
TCAATCCATAGGGACTAATATACATTGGTATCAACAAAAGCCAGGTAAACCACCCAGGCTTTTGATTAAGTATGCAA
GTGAGTCTATTTCCGGTATCCCTGACCGCTTCTCTGGATCAGGCAGTGGCACAGAGTTCACACTCACCATATCTAGT
GTGCAATCAGAGGACTTCGCCGTGTATTACTGCCAACAGAATAATAACTGGCCGACTACCTTCGGACCCGGTACAAA
GCTGACCGTTTTAGGCGGTGGCGGTAGTGGGGGAGGCGGTTCTGGCGGCGGAGGGTCCGGCGGTGGAGGATCACAAG
TACAGTTGCAGCAATCCGGTCCCGGTCTCGTCAAACCGAGTGAGACGCTTAGTATAACGTGTACTGTTTCAGGCTTT
AGCCTTACGAACTATGGAGTTCACTGGATTCGGCAGGCACCCGGCAAAGGTTTGGAATGGCTGGGTGTTATTTGGTC
AGGTGGAAATACAGACTATAACACCCCCTTTACAAGTCGGTTCACAATTACGAAAGATAATTCCAAAAATCAAGTTT
ATTTCAAGTTGAGATCCGTCCGCGCGGACGACACTGCGATCTACTATTGTGCGAGGGCACTGACCTACTACGATTAC
GAATTTGCGTATTGGGGGCAAGGGACTCTTGTAACAGTCTCGAGCGGCGGTGGAGGGTCCGGCGGTGGTGGATCAGA
GGTGCAGCTGGTGGAGTCTGGGGGAGGCTTGGTCCAGCCTGGGGGGTCCCTGAGACTCTCCTGTGCAGCCTCTGGAT
TCACCATCAGTACCAATGCAATGAGCTGGGTCCGCCAGGCTCCAGGGAAGGGGCTGGAGTGGATCGGAGTCATTACT
GGTCGTGATATCACATACTACGCGAGCTGGGCGAAAGGCAGATTCACCATCTCCAGAGACAATTCCAAGAACACGCT
GTATCTTCAAATGAACAGCCTGAGAGCCGAGGACACGGCTGTGTATTACTGTGCGAGAGACGGTGGTTCTTCTGCTA
TTACTAGTAACAACATTTGGGGCCAGGGAACCCTGGTCACCGTGTCCTCAGCTAGCACCAAGGGCCCATCGGTCTTC
CCCCTGGCACCCTCCTCCAAGAGCACCTCTGGGGGCACAGCGGCCCTGGGCTGCCTGGTCAAGGACTACTTCCCCGA
ACCGGTGACGGTGTCGTGGAACTCAGGCGCCCTGACCAGCGGCGTGCACACCTTCCCGGCTGTCCTACAGTCCTCAG
GACTCTACTCCCTCAGCAGCGTGGTGACCGTGCCCTCCAGCAGCTTGGGCACCCAGACCTACATCTGCAACGTGAAT
CACAAGCCCAGCAACACCAAGGTGGACAAGAGAGTTGAGCCCAAATCTTGTGACAAAACTCACACATGCCCACCGTG
CCCAGCACCTGAAGCCGCGGGGGCACCGTCAGTCTTCCTCTTCCCCCCAAAACCCAAGGACACCCTCATGATCTCCC
GGACCCCTGAGGTCACATGCGTGGTGGTGGACGTGAGCCACGAAGACCCTGAGGTCAAGTTCAACTGGTACGTGGAC
GGCGTGGAGGTGCATAATGCCAAGACAAAGCCGCGGGAGGAGCAGTACAACAGCACGTACCGTGTGGTCAGCGTCCT
CACCGTCCTGCACCAGGACTGGCTGAATGGCAAGGAGTACAAGTGCGCGGTCTCCAACAAAGCCCTCCCAGCCCCCA
TCGAGAAAACCATCTCCAAAGCCAAAGGGCAGCCCCGAGAACCACAGGTGTACACCCTGCCCCCATCCCGGGATGAG
CTGACCAAGAACCAGGTCAGCCTGACCTGCCTGGTCAAAGGCTTCTATCCCAGCGACATCGCCGTGGAGTGGGAGAG
CAATGGGCAGCCGGAGAACAACTACAAGACCACGCCTCCCGTGCTGGACTCCGACGGCTCCTTCTTCCTCTATAGCA
AGCTCACCGTGGACAAGAGCAGGTGGCAGCAGGGGAACGTCTTCTCATGCTCCGTGATGCATGAGGCTCTGCACAAC
CACTACACGCAGAAGAGCCTCTCCCTGTCTCCGGGTGGCGGTGGAGGGTCCGGCGGTGGTGGATCCGAGGTGCAGCT
GTTGGAGTCTGGGGGAGGCTTGGTACAGCCTGGGGGGTCCCTGAGACTCTCCTGTGCAGCCTCTGGATTCTCCTTCA
GTAGCGGGTACGACATGTGCTGGGTCCGCCAGGCTCCAGGGAAGGGGCTGGAGTGGATCGCATGCATTGCTGCTGGT
AGTGCTGGTATCACTTACGACGCGAACTGGGCGAAAGGCCGGTTCACCATCTCCAGAGACAATTCCAAGAACACGCT
GTATCTGCAAATGAACAGCCTGAGAGCCGAGGACACGGCCGTATATTACTGTGCGAGATCGGCGTTTTCGTTCGACT
ACGCCATGGACCTCTGGGGCCAGGGAACCCTGGTCACCGTGTCGAGCGGTGGAGGCGGATCTGGCGGAGGTGGTTCC
GGCGGTGGCGGCTCCGGTGGAGGCGGCTCTGACATCCAGATGACCCAGTCTCCTTCCACCCTGTCTGCATCTGTAGG
AGACAGAGTCACCATCACTTGCCAGGCCAGTCAGAGCATTAGTTCCCACTTAAACTGGTATCAGCAGAAACCAGGGA
AAGCCCCTAAGCTCCTGATCTATAAGGCATCCACTCTGGCATCTGGGGTCCCATCAAGGTTCAGCGGCAGTGGATCT
GGGACAGAATTTACTCTCACCATCAGCAGCCTGCAGCCTGATGATTTTGCAACTTATTACTGCCAACAGGGTTATAG
TTGGGGTAATGTTGATAATGTTTTCGGCGGAGGGACCAAGGTGGAGATCAAAGGCGGTGGAGGGTCCGGCGGTGGTG
GCTCCGGACGGTCGCTGGTGGAGTCTGGGGGAGGCTTGGTCCAGCCTGGGGGGTCCCTGAGACTCTCCTGTACTGCC
TCTGGATTCACCATCAGTAGCTACCACATGCAGTGGGTCCGCCAGGCTCCAGGGAAGGGGCTGGAGTACATCGGAAC
CATTAGTAGTGGTGGTAATGTATACTACGCAAGCTCCGCTAGAGGCAGATTCACCATCTCCAGACCCTCGTCCAAGA
ACACGGTGGATCTTCAAATGAACAGCCTGAGAGCCGAGGACACGGCTGTGTATTACTGTGCGAGAGACTCTGGTTAT
AGTGATCCTATGTGGGGCCAGGGAACCCTGGTCACCGTCTCTTCAGGCGGTGGCGGTAGTGGGGGAGGCGGTTCTGG
CGGCGGAGGGTCCGGCGGTGGAGGATCAGACGTTGTGATGACCCAGTCTCCATCTTCCGTGTCTGCATCTGTAGGAG
ACAGAGTCACCATCACCTGTCAGGCCAGTCAGAACATTAGGACTTACTTATCCTGGTATCAGCAGAAACCAGGGAAA
GCCCCTAAGCTCCTGATCTATGCTGCAGCCAATCTGGCATCTGGGGTCCCATCAAGGTTCAGCGGCAGTGGATCTGG
GACAGATTTCACTCTCACCATCAGCGACCTGGAGCCTGGCGATGCTGCAACTTACTATTGTCAGTCTACCTATCTTG
GTACTGATTATGTTGGCGGTGCTTTCGGCGGAGGGACCAAGGTGGAGATCAAATGA
>SEQ ID 302 SI-55P9 chain A aa
EIVLTQSPSTLSVSPGERATFSCRASQSIGTNIHWYQQKPGKPPRLLIKYASESISGIPDRFSGSGSGTEFTLTISS
VQSEDFAVYYCQQNNNWPTTFGPGTKLTVLGGGGSGGGGSGGGGSGGGGSQVQLQQSGPGLVKPSETLSITCTVSGF
SLTNYGVHWIRQAPGKGLEWLGVIWSGGNTDYNTPFTSRFTITKDNSKNQVYFKLRSVRADDTAIYYCARALTYYDY
EFAYWGQGTLVTVSSGGGGSGGGGSEVQLVESGGGLVQPGGSLRLSCAASGFTISTNAMSWVRQAPGKGLEWIGVIT
GRDITYYASWAKGRFTISRDNSKNTLYLQMNSLRAEDTAVYYCARDGGSSAITSNNIWGQGTLVTVSSASTKGPSVF
PLAPSSKSTSGGTAALGCLVKDYFPEPVTVSWNSGALTSGVHTFPAVLQSSGLYSLSSVVTVPSSSLGTQTYICNVN
HKPSNTKVDKRVEPKSCDKTHTCPPCPAPEAAGAPSVFLFPPKPKDTLMISRTPEVTCVVVDVSHEDPEVKFNWYVD
GVEVHNAKTKPREEQYNSTYRVVSVLTVLHQDWLNGKEYKCAVSNKALPAPIEKTISKAKGQPREPQVYTLPPSRDE
LTKNQVSLTCLVKGFYPSDIAVEWESNGQPENNYKTTPPVLDSDGSFFLYSKLTVDKSRWQQGNVFSCSVMHEALHN
HYTQKSLSLSPGGGGGSGGGGSEVQLLESGGGLVQPGGSLRLSCAASGFSFSSGYDMCWVRQAPGKGLEWIACIAAG
SAGITYDANWAKGRFTISRDNSKNTLYLQMNSLRAEDTAVYYCARSAFSFDYAMDLWGQGTLVTVSSGGGGSGGGGS
GGGGSGGGGSDIQMTQSPSTLSASVGDRVTITCQASQSISSHLNWYQQKPGKAPKLLIYKASTLASGVPSRFSGSGS
GTEFTLTISSLQPDDFATYYCQQGYSWGNVDNVFGGGTKVEIKGGGGSGGGGSGRSLVESGGGLVQPGGSLRLSCTA
SGFTISSYHMQWVRQAPGKGLEYIGTISSGGNVYYASSARGRFTISRPSSKNTVDLQMNSLRAEDTAVYYCARDSGY
SDPMWGQGTLVTVSSGGGGSGGGGSGGGGSGGGGSDVVMTQSPSSVSASVGDRVTITCQASQNIRTYLSWYQQKPGK
APKLLIYAAANLASGVPSRFSGSGSGTDFTLTISDLEPGDAATYYCQSTYLGTDYVGGAFGGGTKVEIK
>SEQ ID 303 SI-55P9 chain B nt
GAAAATGTATTGACACAGAGCCCCGCCTCCCTCAGTGCCTCACCTGGGGAAAGGGTAACTATCACTTGCTCTGCATC
AAGCAGCGTCTCATACATGCATTGGTATCAACAAAAGCCTGGACAGGCCCCCAAGCTCTGGATATACGATACGAGCA
AGCTGGCTTCCGGCGTACCTAGCCGCTTCAGTGGTTCCGGCTCAGGCAACGATCACACCCTTACGATTTCCAGTATG
GAACCCGAAGATTTTGCAACTTATTATTGTTTCCAGGGGAGCGTGTACCCATTCACTTTCGGGCAGGGGACAAAAGT
GACGGTACTGGGTGGAGGCGGTTCAGGCGGAGGTGGTTCCGGCGGTGGCGGCTCCGGTGGAGGCGGCTCTCAGGTCA
CATTGAAGGAATCTGGCCCCGGCCTTGTTCAGCCAGGACAGACCCTTAGGCTCACCTGTGCCTTCAGTGGTTTTTCT
CTTAGCACTAGCGGTATGGGGGTCGGCTGGATTCGGCAGCCTCCCGGCAAAGGTCTTGAGTGGTTGGCTCACATTTG
GTGGGACGACGACAAACGGTATAATCCTGCCTTGAAAAGTCGGCTGACCATTAGTAAGGATACCTCAAAAAATCAAG
TGTACTTGCAAATGAATAGCCTTGACGCCGAGGATACGGCTGTATATTATTGCGCGCGGATGGAACTCTGGTCTTAC
TACTTTGATTATTGGGGGCAGGGGACTCTCGTCACGGTCTCGAGCGGCGGTGGAGGGTCCGGCGGTGGTGGATCAGA
CGTCGTGATGACCCAGTCTCCTTCCACCCTGTCTGCATCTGTAGGAGACAGAGTCACCATCAATTGCCAAGCCAGTG
AGAGCATTAGCAGTTGGTTAGCCTGGTATCAGCAGAAACCAGGGAAAGCCCCTAAGCTCCTGATCTATGAAGCATCC
AAACTGGCATCTGGGGTCCCATCAAGGTTCAGCGGCAGTGGATCTGGGACAGAATTCACTCTCACCATCAGCAGCCT
GCAGCCTGATGATTTTGCAACTTATTACTGCCAAGGCTATTTTTATTTTATTAGTCGTACTTATGTAAATTCTTTCG
GCGGAGGGACCAAGGTGGAGATCAAACGTACGGTGGCTGCACCATCTGTCTTCATCTTCCCGCCATCTGATGAGCAG
TTGAAATCTGGAACTGCCTCTGTTGTGTGCCTGCTGAATAACTTCTATCCCAGAGAGGCCAAAGTACAGTGGAAGGT
GGATAACGCCCTCCAATCGGGTAACTCCCAGGAGAGTGTCACAGAGCAGGACAGCAAGGACAGCACCTACAGCCTCA
GCAGCACCCTGACGCTGAGCAAAGCAGACTACGAGAAACACAAAGTCTACGCCTGCGAAGTCACCCATCAGGGCCTG
AGCTCGCCCGTCACAAAGAGCTTCAACAGGGGAGAGTGTTGA
>SEQ ID 304 SI-55P9 chain B aa
ENVLTQSPASLSASPGERVTITCSASSSVSYMHWYQQKPGQAPKLWIYDTSKLASGVPSRFSGSGSGNDHTLTISSM
EPEDFATYYCFQGSVYPFTFGQGTKVTVLGGGGSGGGGSGGGGSGGGGSQVTLKESGPGLVQPGQTLRLTCAFSGFS
LSTSGMGVGWIRQPPGKGLEWLAHIWWDDDKRYNPALKSRLTISKDTSKNQVYLQMNSLDAEDTAVYYCARMELWSY
YFDYWGQGTLVTVSSGGGGSGGGGSDVVMTQSPSTLSASVGDRVTINCQASESISSWLAWYQQKPGKAPKLLIYEAS
KLASGVPSRFSGSGSGTEFTLTISSLQPDDFATYYCQGYFYFISRTYVNSFGGGTKVEIKRTVAAPSVFIFPPSDEQ
LKSGTASVVCLLNNFYPREAKVQWKVDNALQSGNSQESVTEQDSKDSTYSLSSTLTLSKADYEKHKVYACEVTHQGL
SSPVTKSFNRGEC
>SEQ ID 305 SI-55P10 chain A nt
GAAATCGTCCTTACACAATCTCCTAGCACACTGAGTGTGAGCCCCGGCGAACGCGCGACTTTCTCTTGCAGGGCAAG
TCAATCCATAGGGACTAATATACATTGGTATCAACAAAAGCCAGGTAAACCACCCAGGCTTTTGATTAAGTATGCAA
GTGAGTCTATTTCCGGTATCCCTGACCGCTTCTCTGGATCAGGCAGTGGCACAGAGTTCACACTCACCATATCTAGT
GTGCAATCAGAGGACTTCGCCGTGTATTACTGCCAACAGAATAATAACTGGCCGACTACCTTCGGACCCGGTACAAA
GCTGACCGTTTTAGGCGGTGGCGGTAGTGGGGGAGGCGGTTCTGGCGGCGGAGGGTCCGGCGGTGGAGGATCACAAG
TACAGTTGCAGCAATCCGGTCCCGGTCTCGTCAAACCGAGTGAGACGCTTAGTATAACGTGTACTGTTTCAGGCTTT
AGCCTTACGAACTATGGAGTTCACTGGATTCGGCAGGCACCCGGCAAAGGTTTGGAATGGCTGGGTGTTATTTGGTC
AGGTGGAAATACAGACTATAACACCCCCTTTACAAGTCGGTTCACAATTACGAAAGATAATTCCAAAAATCAAGTTT
ATTTCAAGTTGAGATCCGTCCGCGCGGACGACACTGCGATCTACTATTGTGCGAGGGCACTGACCTACTACGATTAC
GAATTTGCGTATTGGGGGCAAGGGACTCTTGTAACAGTCTCGAGCGGCGGTGGAGGGTCCGGCGGTGGTGGATCAGA
GGTGCAGCTGGTGGAGTCTGGGGGAGGCTTGGTCCAGCCTGGGGGGTCCCTGAGACTCTCCTGTGCAGCCTCTGGAT
TCACCATCAGTACCAATGCAATGAGCTGGGTCCGCCAGGCTCCAGGGAAGGGGCTGGAGTGGATCGGAGTCATTACT
GGTCGTGATATCACATACTACGCGAGCTGGGCGAAAGGCAGATTCACCATCTCCAGAGACAATTCCAAGAACACGCT
GTATCTTCAAATGAACAGCCTGAGAGCCGAGGACACGGCTGTGTATTACTGTGCGAGAGACGGTGGTTCTTCTGCTA
TTACTAGTAACAACATTTGGGGCCAGGGAACCCTGGTCACCGTGTCCTCAGCTAGCACCAAGGGCCCATCGGTCTTC
CCCCTGGCACCCTCCTCCAAGAGCACCTCTGGGGGCACAGCGGCCCTGGGCTGCCTGGTCAAGGACTACTTCCCCGA
ACCGGTGACGGTGTCGTGGAACTCAGGCGCCCTGACCAGCGGCGTGCACACCTTCCCGGCTGTCCTACAGTCCTCAG
GACTCTACTCCCTCAGCAGCGTGGTGACCGTGCCCTCCAGCAGCTTGGGCACCCAGACCTACATCTGCAACGTGAAT
CACAAGCCCAGCAACACCAAGGTGGACAAGAGAGTTGAGCCCAAATCTTGTGACAAAACTCACACATGCCCACCGTG
CCCAGCACCTGAAGCCGCGGGGGCACCGTCAGTCTTCCTCTTCCCCCCAAAACCCAAGGACACCCTCATGATCTCCC
GGACCCCTGAGGTCACATGCGTGGTGGTGGACGTGAGCCACGAAGACCCTGAGGTCAAGTTCAACTGGTACGTGGAC
GGCGTGGAGGTGCATAATGCCAAGACAAAGCCGCGGGAGGAGCAGTACAACAGCACGTACCGTGTGGTCAGCGTCCT
CACCGTCCTGCACCAGGACTGGCTGAATGGCAAGGAGTACAAGTGCGCGGTCTCCAACAAAGCCCTCCCAGCCCCCA
TCGAGAAAACCATCTCCAAAGCCAAAGGGCAGCCCCGAGAACCACAGGTGTACACCCTGCCCCCATCCCGGGATGAG
CTGACCAAGAACCAGGTCAGCCTGACCTGCCTGGTCAAAGGCTTCTATCCCAGCGACATCGCCGTGGAGTGGGAGAG
CAATGGGCAGCCGGAGAACAACTACAAGACCACGCCTCCCGTGCTGGACTCCGACGGCTCCTTCTTCCTCTATAGCA
AGCTCACCGTGGACAAGAGCAGGTGGCAGCAGGGGAACGTCTTCTCATGCTCCGTGATGCATGAGGCTCTGCACAAC
CACTACACGCAGAAGAGCCTCTCCCTGTCTCCGGGTGGCGGTGGAGGGTCCGGCGGTGGTGGATCCGAGGTGCAGCT
GTTGGAGTCTGGGGGAGGCTTGGTACAGCCTGGGGGGTCCCTGAGACTCTCCTGTGCAGCCTCTGGATTCTCCTTCA
GTAGCGGGTACGACATGTGCTGGGTCCGCCAGGCTCCAGGGAAGGGGCTGGAGTGGATCGCATGCATTGCTGCTGGT
AGTGCTGGTATCACTTACGACGCGAACTGGGCGAAAGGCCGGTTCACCATCTCCAGAGACAATTCCAAGAACACGCT
GTATCTGCAAATGAACAGCCTGAGAGCCGAGGACACGGCCGTATATTACTGTGCGAGATCGGCGTTTTCGTTCGACT
ACGCCATGGACCTCTGGGGCCAGGGAACCCTGGTCACCGTGTCGAGCGGTGGAGGCGGATCTGGCGGAGGTGGTTCC
GGCGGTGGCGGCTCCGGTGGAGGCGGCTCTGACATCCAGATGACCCAGTCTCCTTCCACCCTGTCTGCATCTGTAGG
AGACAGAGTCACCATCACTTGCCAGGCCAGTCAGAGCATTAGTTCCCACTTAAACTGGTATCAGCAGAAACCAGGGA
AAGCCCCTAAGCTCCTGATCTATAAGGCATCCACTCTGGCATCTGGGGTCCCATCAAGGTTCAGCGGCAGTGGATCT
GGGACAGAATTTACTCTCACCATCAGCAGCCTGCAGCCTGATGATTTTGCAACTTATTACTGCCAACAGGGTTATAG
TTGGGGTAATGTTGATAATGTTTTCGGCGGAGGGACCAAGGTGGAGATCAAAGGCGGTGGAGGGTCCGGCGGTGGTG
GCTCCGGACGAGAGGGCCCCGAGCTGTCTCCTGATGACCCAGCAGGCCTCTTGGACTTGCGGCAGGGTATGTTCGCT
CAACTTGTGGCTCAGAATGTTCTGCTCATTGATGGACCACTCTCTTGGTATAGTGACCCCGGTCTGGCCGGGGTGAG
TCTGACCGGCGGGCTCTCTTATAAAGAGGATACTAAGGAACTGGTCGTAGCAAAAGCGGGCGTTTATTACGTTTTTT
TTCAGCTGGAGCTCAGGCGCGTGGTGGCCGGCGAGGGCAGTGGCTCTGTGTCCCTGGCCCTGCACTTACAGCCCTTG
AGAAGCGCTGCAGGTGCTGCCGCACTGGCTTTAACTGTTGACCTCCCTCCGGCCTCTTCTGAAGCTAGAAACAGCGC
TTTCGGCTTCCAAGGGCGCCTGCTGCACCTGAGCGCAGGCCAGCGCTTAGGTGTGCACCTTCATACAGAGGCCAGGG
CCCGACACGCTTGGCAGCTCACACAGGGTGCCACGGTTCTCGGACTTTTCCGCGTTACTCCCGAGATCCCCGCTGGC
CTCGGAAGTACTGGTTCTGGGTCTAAACCCGGTTCCGGCGAAGGTAGTACTAAAGGACGAGAAGGGCCAGAGTTAAG
TCCAGATGACCCTGCTGGGCTTTTGGACCTGCGGCAGGGCATGTTCGCTCAACTGGTGGCTCAGAACGTGCTGCTGA
TCGATGGCCCCCTGAGTTGGTACAGCGATCCCGGGCTGGCAGGCGTGTCACTTACAGGGGGCCTCTCTTACAAGGAA
GACACCAAGGAGTTAGTGGTCGCTAAGGCTGGCGTGTATTACGTGTTCTTCCAACTGGAGCTGAGAAGGGTTGTGGC
AGGAGAGGGTAGCGGCAGCGTGTCTTTAGCCCTTCACTTGCAGCCCCTGAGGTCTGCTGCAGGTGCAGCCGCTCTCG
CGCTCACCGTGGATCTCCCCCCAGCCTCATCTGAAGCTAGGAACAGTGCATTTGGCTTTCAGGGACGCTTGCTGCAC
CTCTCCGCTGGACAGAGGCTGGGCGTGCACCTTCACACAGAGGCCCGTGCCAGGCATGCATGGCAGCTCACTCAGGG
GGCAACAGTGCTGGGTCTCTTCCGCGTGACTCCTGAAATACCAGCTGGACTTGGCGGTGGAGGCAGCGGCGGAGGAG
GATCTCGTGAGGGGCCAGAACTGTCCCCCGATGACCCAGCCGGACTGCTCGATCTCAGACAGGGCATGTTCGCTCAG
CTTGTAGCCCAAAATGTCCTCCTGATTGACGGCCCTTTGAGCTGGTATAGTGATCCCGGCTTGGCCGGGGTATCTCT
GACCGGAGGCCTCTCCTACAAGGAAGACACCAAAGAGCTGGTGGTGGCAAAAGCGGGGGTGTATTATGTGTTCTTTC
AGCTCGAGCTGCGGAGAGTTGTGGCCGGGGAAGGGTCTGGGAGCGTATCTCTTGCACTTCACCTGCAGCCCCTGCGC
AGCGCCGCTGGAGCCGCCGCCCTTGCTCTTACTGTGGATCTGCCTCCTGCTTCCTCAGAAGCACGCAACAGCGCCTT
CGGCTTTCAAGGACGTCTCCTGCACTTGTCCGCAGGACAGAGGTTGGGCGTCCATTTACACACTGAGGCACGGGCAC
GGCACGCTTGGCAGCTTACCCAGGGAGCCACCGTGCTGGGACTCTTTAGAGTGACACCCGAGATCCCCGCTGGCTTG
TGA
>SEQ ID 306 SI-55P10 chain A aa
EIVLTQSPSTLSVSPGERATFSCRASQSIGTNIHWYQQKPGKPPRLLIKYASESISGIPDRFSGSGSGTEFTLTISS
VQSEDFAVYYCQQNNNWPTTFGPGTKLTVLGGGGSGGGGSGGGGSGGGGSQVQLQQSGPGLVKPSETLSITCTVSGF
SLTNYGVHWIRQAPGKGLEWLGVIWSGGNTDYNTPFTSRFTITKDNSKNQVYFKLRSVRADDTAIYYCARALTYYDY
EFAYWGQGTLVTVSSGGGGSGGGGSEVQLVESGGGLVQPGGSLRLSCAASGFTISTNAMSWVRQAPGKGLEWIGVIT
GRDITYYASWAKGRFTISRDNSKNTLYLQMNSLRAEDTAVYYCARDGGSSAITSNNIWGQGTLVTVSSASTKGPSVF
PLAPSSKSTSGGTAALGCLVKDYFPEPVTVSWNSGALTSGVHTFPAVLQSSGLYSLSSVVTVPSSSLGTQTYICNVN
HKPSNTKVDKRVEPKSCDKTHTCPPCPAPEAAGAPSVFLFPPKPKDTLMISRTPEVTCVVVDVSHEDPEVKFNWYVD
GVEVHNAKTKPREEQYNSTYRVVSVLTVLHQDWLNGKEYKCAVSNKALPAPIEKTISKAKGQPREPQVYTLPPSRDE
LTKNQVSLTCLVKGFYPSDIAVEWESNGQPENNYKTTPPVLDSDGSFFLYSKLTVDKSRWQQGNVFSCSVMHEALHN
HYTQKSLSLSPGGGGGSGGGGSEVQLLESGGGLVQPGGSLRLSCAASGFSFSSGYDMCWVRQAPGKGLEWIACIAAG
SAGITYDANWAKGRFTISRDNSKNTLYLQMNSLRAEDTAVYYCARSAFSFDYAMDLWGQGTLVTVSSGGGGSGGGGS
GGGGSGGGGSDIQMTQSPSTLSASVGDRVTITCQASQSISSHLNWYQQKPGKAPKLLIYKASTLASGVPSRFSGSGS
GTEFTLTISSLQPDDFATYYCQQGYSWGNVDNVFGGGTKVEIKGGGGSGGGGSGREGPELSPDDPAGLLDLRQGMFA
QLVAQNVLLIDGPLSWYSDPGLAGVSLTGGLSYKEDTKELVVAKAGVYYVFFQLELRRVVAGEGSGSVSLALHLQPL
RSAAGAAALALTVDLPPASSEARNSAFGFQGRLLHLSAGQRLGVHLHTEARARHAWQLTQGATVLGLFRVTPEIPAG
LGSTGSGSKPGSGEGSTKGREGPELSPDDPAGLLDLRQGMFAQLVAQNVLLIDGPLSWYSDPGLAGVSLTGGLSYKE
DTKELVVAKAGVYYVFFQLELRRVVAGEGSGSVSLALHLQPLRSAAGAAALALTVDLPPASSEARNSAFGFQGRLLH
LSAGQRLGVHLHTEARARHAWQLTQGATVLGLFRVTPEIPAGLGGGGSGGGGSREGPELSPDDPAGLLDLRQGMFAQ
LVAQNVLLIDGPLSWYSDPGLAGVSLTGGLSYKEDTKELVVAKAGVYYVFFQLELRRVVAGEGSGSVSLALHLQPLR
SAAGAAALALTVDLPPASSEARNSAFGFQGRLLHLSAGQRLGVHLHTEARARHAWQLTQGATVLGLFRVTPEIPAGL
>SEQ ID 307 SI-55P10 chain B nt
GAAAATGTATTGACACAGAGCCCCGCCTCCCTCAGTGCCTCACCTGGGGAAAGGGTAACTATCACTTGCTCTGCATC
AAGCAGCGTCTCATACATGCATTGGTATCAACAAAAGCCTGGACAGGCCCCCAAGCTCTGGATATACGATACGAGCA
AGCTGGCTTCCGGCGTACCTAGCCGCTTCAGTGGTTCCGGCTCAGGCAACGATCACACCCTTACGATTTCCAGTATG
GAACCCGAAGATTTTGCAACTTATTATTGTTTCCAGGGGAGCGTGTACCCATTCACTTTCGGGCAGGGGACAAAAGT
GACGGTACTGGGTGGAGGCGGTTCAGGCGGAGGTGGTTCCGGCGGTGGCGGCTCCGGTGGAGGCGGCTCTCAGGTCA
CATTGAAGGAATCTGGCCCCGGCCTTGTTCAGCCAGGACAGACCCTTAGGCTCACCTGTGCCTTCAGTGGTTTTTCT
CTTAGCACTAGCGGTATGGGGGTCGGCTGGATTCGGCAGCCTCCCGGCAAAGGTCTTGAGTGGTTGGCTCACATTTG
GTGGGACGACGACAAACGGTATAATCCTGCCTTGAAAAGTCGGCTGACCATTAGTAAGGATACCTCAAAAAATCAAG
TGTACTTGCAAATGAATAGCCTTGACGCCGAGGATACGGCTGTATATTATTGCGCGCGGATGGAACTCTGGTCTTAC
TACTTTGATTATTGGGGGCAGGGGACTCTCGTCACGGTCTCGAGCGGCGGTGGAGGGTCCGGCGGTGGTGGATCAGA
CGTCGTGATGACCCAGTCTCCTTCCACCCTGTCTGCATCTGTAGGAGACAGAGTCACCATCAATTGCCAAGCCAGTG
AGAGCATTAGCAGTTGGTTAGCCTGGTATCAGCAGAAACCAGGGAAAGCCCCTAAGCTCCTGATCTATGAAGCATCC
AAACTGGCATCTGGGGTCCCATCAAGGTTCAGCGGCAGTGGATCTGGGACAGAATTCACTCTCACCATCAGCAGCCT
GCAGCCTGATGATTTTGCAACTTATTACTGCCAAGGCTATTTTTATTTTATTAGTCGTACTTATGTAAATTCTTTCG
GCGGAGGGACCAAGGTGGAGATCAAACGTACGGTGGCTGCACCATCTGTCTTCATCTTCCCGCCATCTGATGAGCAG
TTGAAATCTGGAACTGCCTCTGTTGTGTGCCTGCTGAATAACTTCTATCCCAGAGAGGCCAAAGTACAGTGGAAGGT
GGATAACGCCCTCCAATCGGGTAACTCCCAGGAGAGTGTCACAGAGCAGGACAGCAAGGACAGCACCTACAGCCTCA
GCAGCACCCTGACGCTGAGCAAAGCAGACTACGAGAAACACAAAGTCTACGCCTGCGAAGTCACCCATCAGGGCCTG
AGCTCGCCCGTCACAAAGAGCTTCAACAGGGGAGAGTGTTGA
>SEQ ID 308 SI-55P10 chain B aa
ENVLTQSPASLSASPGERVTITCSASSSVSYMHWYQQKPGQAPKLWIYDTSKLASGVPSRFSGSGSGNDHTLTISSM
EPEDFATYYCFQGSVYPFTFGQGTKVTVLGGGGSGGGGSGGGGSGGGGSQVTLKESGPGLVQPGQTLRLTCAFSGFS
LSTSGMGVGWIRQPPGKGLEWLAHIWWDDDKRYNPALKSRLTISKDTSKNQVYLQMNSLDAEDTAVYYCARMELWSY
YFDYWGQGTLVTVSSGGGGSGGGGSDVVMTQSPSTLSASVGDRVTINCQASESISSWLAWYQQKPGKAPKLLIYEAS
KLASGVPSRFSGSGSGTEFTLTISSLQPDDFATYYCQGYFYFISRTYVNSFGGGTKVEIKRTVAAPSVFIFPPSDEQ
LKSGTASVVCLLNNFYPREAKVQWKVDNALQSGNSQESVTEQDSKDSTYSLSSTLTLSKADYEKHKVYACEVTHQGL
SSPVTKSFNRGEC
>SEQ ID 309 NKG2D dimer nt
TTTCTTAATTCCCTTTTCAACCAAGAGGTTCAGATCCCCTTGACTGAAAGCTATTGCGGCCCTTGTCCGAAAAACTG
GATATGTTACAAGAATAATTGTTACCAATTCTTCGACGAAAGCAAGAACTGGTATGAGAGTCAGGCGTCTTGTATGA
GTCAGAATGCCAGCCTGCTTAAGGTTTATTCAAAAGAAGACCAGGATCTGCTTAAGTTGGTAAAGAGCTACCACTGG
ATGGGGCTGGTACATATCCCAACGAATGGGTCATGGCAGTGGGAGGACGGTTCTATTCTGAGTCCAAATCTCCTGAC
GATCATCGAAATGCAGAAAGGGGACTGTGCCCTGTATGCATCATCCTTCAAGGGGTACATCGAGAACTGCAGTACCC
CAAATACCTACATTTGTATGCAAAGAACGGTTGGAGGCGGTGGCTCAGGCGGAGGCGGCTCAGGAGGTGGCGGTTCA
GGAGGCGGCGGATCTTTCCTAAACTCATTATTCAACCAAGAAGTTCAAATTCCCTTGACCGAAAGTTACTGTGGCCC
ATGTCCTAAAAACTGGATATGTTACAAAAATAACTGCTACCAATTTTTTGATGAGAGTAAAAACTGGTATGAGAGCC
AGGCTTCTTGTATGTCTCAAAATGCCAGCCTTCTGAAAGTATACAGCAAAGAGGACCAGGATTTACTTAAACTGGTG
AAGTCATATCATTGGATGGGACTAGTACACATTCCAACAAATGGATCTTGGCAGTGGGAAGATGGCTCCATTCTCTC
ACCCAACCTACTAACAATAATTGAAATGCAGAAGGGAGACTGTGCACTCTATGCCTCGAGCTTTAAAGGCTATATAG
AAAACTGTTCAACTCCAAATACGTACATCTGCATGCAAAGGACTGTG
>SEQ ID 310 NKG2D dimer aa
FLNSLFNQEVQIPLTESYCGPCPKNWICYKNNCYQFFDESKNWYESQASCMSQNASLLKVYSKEDQDLLKLVKSYHW
MGLVHIPTNGSWQWEDGSILSPNLLTIIEMQKGDCALYASSFKGYIENCSTPNTYICMQRTVGGGGSGGGGSGGGGS
GGGGSFLNSLFNQEVQIPLTESYCGPCPKNWICYKNNCYQFFDESKNWYESQASCMSQNASLLKVYSKEDQDLLKLV
KSYHWMGLVHIPTNGSWQWEDGSILSPNLLTIIEMQKGDCALYASSFKGYIENCSTPNTYICMQRTV
>SEQ ID 311 anti-FITC 4-4-20 VH nt
GAGGTGAAGCTGGATGAGACTGGAGGAGGCTTGGTGCAACCTGGGAGGCCCATGAAACTCTCCTGTGTTGCCTCTGG
ATTCACTTTTAGTGACTACTGGATGAACTGGGTCCGCCAGTCTCCAGAGAAAGGACTGGAGTGGGTAGCACAAATTA
GAAACAAACCTTATAATTATGAAACATATTATTCAGATTCTGTGAAAGGCAGATTCACCATCTCAAGAGATGATTCC
AAAAGTAGTGTCTACCTGCAAATGAACAACTTAAGAGTTGAAGACATGGGTATCTATTACTGTACGGGTTCTTACTA
TGGTATGGACTACTGGGGTCAAGGAACCTCAGTCACCGTCTCCTCA
>SEQ ID 312 anti-FITC 4-4-20 VH aa
EVKLDETGGGLVQPGRPMKLSCVASGFTFSDYWMNWVRQSPEKGLEWVAQIRNKPYNYETYYSDSVKGRFTISRDDS
KSSVYLQMNNLRVEDMGIYYCTGSYYGMDYWGQGTSVTVSS
>SEQ ID 313 anti-FITC 4-4-20 VL nt
GATGTCGTGATGACCCAAACTCCACTCTCCCTGCCTGTCAGTCTTGGAGATCAAGCCTCCATCTCTTGCAGATCTAG
TCAGAGCCTTGTACACAGTAATGGAAACACCTATTTACGTTGGTACCTGCAGAAGCCAGGCCAGTCTCCAAAGGTCC
TGATCTACAAAGTTTCCAACCGATTTTCTGGGGTCCCAGACAGGTTCAGTGGCAGTGGATCAGGGACAGATTTCACA
CTCAAGATCAGCAGAGTGGAGGCTGAGGATCTGGGAGTTTATTTCTGCTCTCAAAGTACACATGTTCCGTGGACGTT
CGGTGGAGGCACCAAGCTGGAAATCAAA
>SEQ ID 314 anti-FITC 4-4-20 VL aa
DVVMTQTPLSLPVSLGDQASISCRSSQSLVHSNGNTYLRWYLQKPGQSPKVLIYKVSNRFSGVPDRFSGSGSGTDFT
LKISRVEAEDLGVYFCSQSTHVPWTFGGGTKLEIK
>SEQ ID 315 anti-CD3 284A10 FR 1 VH nt
GAGGTGCAGCTGGTGGAGAGCGGCGGCGGCCTGGTGCAGCCCGGCGGCAGCCTGAGGCTGAGCTGCACCGCCAGCGG
CTTCACCATCAGCACCAACGCCATGAGCTGGGTGAGGCAGGCCCCCGGCAAGGGCCTGGAGTGGGTGGGCGTGATCA
CCGGCAGGGACATCACCTACTACGCCAGCTGGGCCAAGGGCAGGTTCACCATCAGCAGGGACACCAGCAAGAACACC
GTGTACCTGCAGATGAACAGCCTGAGGGCCGAGGACACCGCCGTGTACTACTGCGCCAGGGACGGCGGCAGCAGCGC
CATCACCAGCAACAACATCTGGGGCCAGGGCACCCTGGTGACCGTGAGCAGC
>SEQ ID 316 anti-CD3 284A10 FR 1 VH aa
EVQLVESGGGLVQPGGSLRLSCTASGFTISTNAMSWVRQAPGKGLEWVGVITGRDITYYASWAKGRFTISRDTSKNT
VYLQMNSLRAEDTAVYYCARDGGSSAITSNNIWGQGTLVTVSS
>SEQ ID 317 anti-CD3 284A10 FR 1 VL nt
GAGATCGTGATGACCCAGAGCCCCAGCACCCTGAGCGCCAGCGTGGGCGACAGGGTGATCATCACCTGCCAGGCCAG
CGAGAGCATCAGCAGCTGGCTGGCCTGGTACCAGCAGAAGCCCGGCAAGGCCCCCAAGCTGCTGATCTACGAGGCCA
GCAAGCTGGCCAGCGGCGTGCCCAGCAGGTTCAGCGGCAGCGGCAGCGGCGCCGAGTTCACCCTGACCATCAGCAGC
CTGCAGCCCGACGACTTCGCCACCTACTACTGCCAGGGCTACTTCTACTTCATCAGCAGGACCTACGTGAACAGCTT
CGGCCAGGGCACCAAGCTGACCGTGCTG
>SEQ ID 318 anti-CD3 284A10 FR 1 VL aa
EIVMTQSPSTLSASVGDRVIITCQASESISSWLAWYQQKPGKAPKLLIYEASKLASGVPSRFSGSGSGAEFTLTISS
LQPDDFATYYCQGYFYFISRTYVNSFGQGTKLTVL
>SEQ ID 319 anti-EGFR H7 VH nt
CAAGTACAGTTGCAGCAATCCGGTCCCGGTCTCGTCAAACCGAGTGAGACGCTTAGTATAACGTGTACTGTTTCAGG
CTTTAGCCTTACGAACTATGGAGTTCACTGGATTCGGCAGGCACCCGGCAAAGGTTTGGAATGGCTGGGTGTTATTT
GGTCAGGTGGAAATACAGACTATAACACCCCCTTTACAAGTCGGTTCACAATTACGAAAGATAATTCCAAAAATCAA
GTTTATTTCAAGTTGAGATCCGTCCGCGCGGACGACACTGCGATCTACTATTGTGCGAGGGCACTGACCTACTACGA
TTACGAATTTGCGTATTGGGGGCAAGGGACTCTTGTAACAGTCTCGAGC
>SEQ ID 320 anti-EGFR H7 VH aa
QVQLQQSGPGLVKPSETLSITCTVSGFSLTNYGVHWIRQAPGKGLEWLGVIWSGGNTDYNTPFTSRFTITKDNSKNQ
VYFKLRSVRADDTAIYYCARALTYYDYEFAYWGQGTLVTVSS
>SEQ ID 321 anti-EGFR H7 VL nt
GAAATCGTCCTTACACAATCTCCTAGCACACTGAGTGTGAGCCCCGGCGAACGCGCGACTTTCTCTTGCAGGGCAAG
TCAATCCATAGGGACTAATATACATTGGTATCAACAAAAGCCAGGTAAACCACCCAGGCTTTTGATTAAGTATGCAA
GTGAGTCTATTTCCGGTATCCCTGACCGCTTCTCTGGATCAGGCAGTGGCACAGAGTTCACACTCACCATATCTAGT
GTGCAATCAGAGGACTTCGCCGTGTATTACTGCCAACAGAATAATAACTGGCCGACTACCTTCGGACCCGGTACAAA
GCTGACCGTTTTA
>SEQ ID 322 anti-EGFR H7 VL aa
EIVLTQSPSTLSVSPGERATFSCRASQSIGTNIHWYQQKPGKPPRLLIKYASESISGIPDRFSGSGSGTEFTLTISS
VQSEDFAVYYCQQNNNWPTTFGPGTKLTVL
>SEQ ID 323 SI-77H4 chain A nt
GAAATCGTTATGACGCAGAGTCCCTCCACGCTCTCCGCTAGTGTCGGGGATCGCGTCATTATCACATGCCAGGCCTC
CGAGTCAATCAGCAGCTGGCTTGCATGGTATCAACAGAAGCCGGGAAAAGCTCCTAAATTGCTGATCTATGAAGCGT
CAAAATTGGCGTCTGGTGTCCCATCTAGGTTCTCCGGCTCTGGGTCTGGTGCGGAATTTACTTTGACAATCTCCAGT
CTTCAACCAGACGATTTCGCTACCTACTACTGCCAAGGGTATTTCTATTTTATAAGCCGGACATATGTAAACTCCTT
CGGCCAAGGAACAAAGTTGACTGTTCTTGGTGGCGGAGGCAGTGGTGGCGGGGGCAGCGGAGGTGGTGGTTCAGGGG
GTGGTGGGAGCGAAGTCCAATTGGTAGAAAGTGGCGGTGGTCTGGTGCAACCTGGTGGATCTCTTCGCCTCTCATGC
GCCGCTAGTGGCTTTACTATTTCAACTAATGCGATGAGCTGGGTTCGCCAGGCCCCCGGCAAAGGACTTGAGTGGGT
CGGCGTCATCACCGGCAGGGACATTACATACTATGCGAGTTGGGCAAAGGGCAGGTTCACGATTAGCCGCGATACTT
CAAAGAATACCGTTTACCTTCAAATGAATAGCTTGAGGGCGGAAGACACAGCTGTGTATTACTGCGCGAGGGATGGA
GGTAGTTCCGCCATAACTTCCAACAACATATGGGGACAAGGCACGCTGGTTACTGTCTCGAGTGGCGGTGGAGGGTC
CGGCGGTGGTGGATCACAAGTACAGTTGCAGCAATCCGGTCCCGGTCTCGTCAAACCGAGTGAGACGCTTAGTATAA
CGTGTACTGTTTCAGGCTTTAGCCTTACGAACTATGGAGTTCACTGGATTCGGCAGGCACCCGGCAAATGTTTGGAA
TGGCTGGGTGTTATTTGGTCAGGTGGAAATACAGACTATAACACCCCCTTTACAAGTCGGTTCACAATTACGAAAGA
TAATTCCAAAAATCAAGTTTATTTCAAGTTGAGATCCGTCCGCGCGGACGACACTGCGATCTACTATTGTGCGAGGG
CACTGACCTACTACGATTACGAATTTGCGTATTGGGGGCAAGGGACTCTTGTAACAGTCTCCAGTGCTAGCACCAAG
GGCCCATCGGTCTTCCCCCTGGCACCCTCCTCCAAGAGCACCTCTGGGGGCACAGCGGCCCTGGGCTGCCTGGTCAA
GGACTACTTCCCCGAACCGGTGACGGTGTCGTGGAACTCAGGCGCCCTGACCAGCGGCGTGCACACCTTCCCGGCTG
TCCTACAGTCCTCAGGACTCTACTCCCTCAGCAGCGTGGTGACCGTGCCCTCCAGCAGCTTGGGCACCCAGACCTAC
ATCTGCAACGTGAATCACAAGCCCAGCAACACCAAGGTGGACAAGAGAGTTGAGCCCAAATCTTGTGACAAAACTCA
CACATGCCCACCGTGCCCAGCACCTGAAGCCGCGGGGGCACCGTCAGTCTTCCTCTTCCCCCCAAAACCCAAGGACA
CCCTCATGATCTCCCGGACCCCTGAGGTCACATGCGTGGTGGTGGACGTGAGCCACGAAGACCCTGAGGTCAAGTTC
AACTGGTACGTGGACGGCGTGGAGGTGCATAATGCCAAGACAAAGCCGCGGGAGGAGCAGTACAACAGCACGTACCG
TGTGGTCAGCGTCCTCACCGTCCTGCACCAGGACTGGCTGAATGGCAAGGAGTACAAGTGCGCGGTCTCCAACAAAG
CCCTCCCAGCCCCCATCGAGAAAACCATCTCCAAAGCCAAAGGGCAGCCCCGAGAACCACAGGTGTACACCCTGCCC
CCATCCCGGGATGAGCTGACCAAGAACCAGGTCAGCCTGACCTGCCTGGTCAAAGGCTTCTATCCCAGCGACATCGC
CGTGGAGTGGGAGAGCAATGGGCAGCCGGAGAACAACTACAAGACCACGCCTCCCGTGCTGGACTCCGACGGCTCCT
TCTTCCTCTATAGCAAGCTCACCGTGGACAAGAGCAGGTGGCAGCAGGGGAACGTCTTCTCATGCTCCGTGATGCAT
GAGGCTCTGCACAACCACTACACGCAGAAGAGCCTCTCCCTGTCTCCGGGTGGCGGTGGAGGGTCCGGCGGTGGTGG
ATCCGAGGTGCAGCTGTTGGAGTCTGGGGGAGGCTTGGTACAGCCTGGGGGGTCCCTGAGACTCTCCTGTGCAGCCT
CTGGATTCTCCTTCAGTAGCGGGTACGACATGTGCTGGGTCCGCCAGGCTCCAGGGAAGGGGCTGGAGTGGATCGCA
TGCATTGCTGCTGGTAGTGCTGGTATCACTTACGACGCGAACTGGGCGAAAGGCCGGTTCACCATCTCCAGAGACAA
TTCCAAGAACACGCTGTATCTGCAAATGAACAGCCTGAGAGCCGAGGACACGGCCGTATATTACTGTGCGAGATCGG
CGTTTTCGTTCGACTACGCCATGGACCTCTGGGGCCAGGGAACCCTGGTCACCGTGTCGAGCGGTGGAGGCGGATCT
GGCGGAGGTGGTTCCGGCGGTGGCGGCTCCGGTGGAGGCGGCTCTGACATCCAGATGACCCAGTCTCCTTCCACCCT
GTCTGCATCTGTAGGAGACAGAGTCACCATCACTTGCCAGGCCAGTCAGAGCATTAGTTCCCACTTAAACTGGTATC
AGCAGAAACCAGGGAAAGCCCCTAAGCTCCTGATCTATAAGGCATCCACTCTGGCATCTGGGGTCCCATCAAGGTTC
AGCGGCAGTGGATCTGGGACAGAATTTACTCTCACCATCAGCAGCCTGCAGCCTGATGATTTTGCAACTTATTACTG
CCAACAGGGTTATAGTTGGGGTAATGTTGATAATGTTTTCGGCGGAGGGACCAAGGTGGAGATCAAAGGCGGTGGAG
GGTCCGGCGGTGGTGGCTCCGGACGGTCGCTGGTGGAGTCTGGGGGAGGCTTGGTCCAGCCTGGGGGGTCCCTGAGA
CTCTCCTGTACTGCCTCTGGATTCACCATCAGTAGCTACCACATGCAGTGGGTCCGCCAGGCTCCAGGGAAGGGGCT
GGAGTACATCGGAACCATTAGTAGTGGTGGTAATGTATACTACGCAAGCTCCGCTAGAGGCAGATTCACCATCTCCA
GACCCTCGTCCAAGAACACGGTGGATCTTCAAATGAACAGCCTGAGAGCCGAGGACACGGCTGTGTATTACTGTGCG
AGAGACTCTGGTTATAGTGATCCTATGTGGGGCCAGGGAACCCTGGTCACCGTCTCTTCAGGCGGTGGCGGTAGTGG
GGGAGGCGGTTCTGGCGGCGGAGGGTCCGGCGGTGGAGGATCAGACGTTGTGATGACCCAGTCTCCATCTTCCGTGT
CTGCATCTGTAGGAGACAGAGTCACCATCACCTGTCAGGCCAGTCAGAACATTAGGACTTACTTATCCTGGTATCAG
CAGAAACCAGGGAAAGCCCCTAAGCTCCTGATCTATGCTGCAGCCAATCTGGCATCTGGGGTCCCATCAAGGTTCAG
CGGCAGTGGATCTGGGACAGATTTCACTCTCACCATCAGCGACCTGGAGCCTGGCGATGCTGCAACTTACTATTGTC
AGTCTACCTATCTTGGTACTGATTATGTTGGCGGTGCTTTCGGCGGAGGGACCAAGGTGGAGATCAAATGA
>SEQ ID 324 SI-77H4 chain A aa
EIVMTQSPSTLSASVGDRVIITCQASESISSWLAWYQQKPGKAPKLLIYEASKLASGVPSRFSGSGSGAEFTLTISS
LQPDDFATYYCQGYFYFISRTYVNSFGQGTKLTVLGGGGSGGGGSGGGGSGGGGSEVQLVESGGGLVQPGGSLRLSC
AASGFTISTNAMSWVRQAPGKGLEWVGVITGRDITYYASWAKGRFTISRDTSKNTVYLQMNSLRAEDTAVYYCARDG
GSSAITSNNIWGQGTLVTVSSGGGGSGGGGSQVQLQQSGPGLVKPSETLSITCTVSGFSLTNYGVHWIRQAPGKCLE
WLGVIWSGGNTDYNTPFTSRFTITKDNSKNQVYFKLRSVRADDTAIYYCARALTYYDYEFAYWGQGTLVTVSSASTK
GPSVFPLAPSSKSTSGGTAALGCLVKDYFPEPVTVSWNSGALTSGVHTFPAVLQSSGLYSLSSVVTVPSSSLGTQTY
ICNVNHKPSNTKVDKRVEPKSCDKTHTCPPCPAPEAAGAPSVFLFPPKPKDTLMISRTPEVTCVVVDVSHEDPEVKF
NWYVDGVEVHNAKTKPREEQYNSTYRVVSVLTVLHQDWLNGKEYKCAVSNKALPAPIEKTISKAKGQPREPQVYTLP
PSRDELTKNQVSLTCLVKGFYPSDIAVEWESNGQPENNYKTTPPVLDSDGSFFLYSKLTVDKSRWQQGNVFSCSVMH
EALHNHYTQKSLSLSPGGGGGSGGGGSEVQLLESGGGLVQPGGSLRLSCAASGFSFSSGYDMCWVRQAPGKGLEWIA
CIAAGSAGITYDANWAKGRFTISRDNSKNTLYLQMNSLRAEDTAVYYCARSAFSFDYAMDLWGQGTLVTVSSGGGGS
GGGGSGGGGSGGGGSDIQMTQSPSTLSASVGDRVTITCQASQSISSHLNWYQQKPGKAPKLLIYKASTLASGVPSRF
SGSGSGTEFTLTISSLQPDDFATYYCQQGYSWGNVDNVFGGGTKVEIKGGGGSGGGGSGRSLVESGGGLVQPGGSLR
LSCTASGFTISSYHMQWVRQAPGKGLEYIGTISSGGNVYYASSARGRFTISRPSSKNTVDLQMNSLRAEDTAVYYCA
RDSGYSDPMWGQGTLVTVSSGGGGSGGGGSGGGGSGGGGSDVVMTQSPSSVSASVGDRVTITCQASQNIRTYLSWYQ
QKPGKAPKLLIYAAANLASGVPSRFSGSGSGTDFTLTISDLEPGDAATYYCQSTYLGTDYVGGAFGGGTKVEIK
>SEQ ID 325 SI-77H4 chain B nt
GAAAATGTATTGACACAGAGCCCCGCCTCCCTCAGTGCCTCACCTGGGGAAAGGGTAACTATCACTTGCTCTGCATC
AAGCAGCGTCTCATACATGCATTGGTATCAACAAAAGCCTGGACAGGCCCCCAAGCTCTGGATATACGATACGAGCA
AGCTGGCTTCCGGCGTACCTAGCCGCTTCAGTGGTTCCGGCTCAGGCAACGATCACACCCTTACGATTTCCAGTATG
GAACCCGAAGATTTTGCAACTTATTATTGTTTCCAGGGGAGCGTGTACCCATTCACTTTCGGGCAGGGGACAAAAGT
GACCGTCCTAGGCGGTGGCGGTAGTGGGGGAGGCGGTTCTGGCGGCGGAGGGTCCGGCGGTGGAGGATCACAGGTCA
CATTGAAGGAATCTGGCCCCGGCCTTGTTCAGCCAGGACAGACCCTTAGCCTCACCTGTGCCTTCAGTGGTTTTTCT
CTTAGCACTAGCGGTATGGGGGTCGGCTGGATTCGGCAGCCTCCCGGCAAAGGTCTTGAGTGGTTGGCTCACATTTG
GTGGGACGACGACAAACGGTATAATCCTGCCTTGAAAAGTCGGCTGACCATTAGTAAGGATACCTCAAAAAATCAAG
TGTACTTGCAAATGAATAGCCTTGACGCCGAGGATACGGCTGTATATTATTGCGCTCGGATGGAACTCTGGTCTTAC
TACTTTGATTATTGGGGGCAGGGGACTCTCGTCACGGTCTCGAGTGGCGGTGGAGGGTCCGGCGGTGGTGGATCAGA
AATCGTCCTTACACAATCTCCTAGCACACTGAGTGTGAGCCCCGGCGAACGCGCGACTTTCTCTTGCAGGGCAAGTC
AATCCATAGGGACTAATATACATTGGTATCAACAAAAGCCAGGTAAACCACCCAGGCTTTTGATTAAGTATGCAAGT
GAGTCTATTTCCGGTATCCCTGACCGCTTCTCTGGATCAGGCAGTGGCACAGAGTTCACACTCACCATATCTAGTGT
GCAATCAGAGGACTTCGCCGTGTATTACTGCCAACAGAATAATAACTGGCCGACTACCTTCGGATGCGGTACAAAGC
TGACCGTTTTACGTACGGTGGCTGCACCATCTGTCTTCATCTTCCCGCCATCTGATGAGCAGTTGAAATCTGGAACT
GCCTCTGTTGTGTGCCTGCTGAATAACTTCTATCCCAGAGAGGCCAAAGTACAGTGGAAGGTGGATAACGCCCTCCA
ATCGGGTAACTCCCAGGAGAGTGTCACAGAGCAGGACAGCAAGGACAGCACCTACAGCCTCAGCAGCACCCTGACGC
TGAGCAAAGCAGACTACGAGAAACACAAAGTCTACGCCTGCGAAGTCACCCATCAGGGCCTGAGCTCGCCCGTCACA
AAGAGCTTCAACAGGGGAGAGTGTGGCGGTGGCGGTAGCGGTGGCGGCGGAAGTGGTGGCGGAGGATCCCAGTCTGC
CCTGACTCAGCCTGCCTCCGTGTCTGGGTCTCCTGGACAGTCGATCACCATCTCCTGCACTGGAACCAGCAGTGACG
TTGGTGGTTATAACTTTGTCTCCTGGTACCAACAACACCCAGGCAAAGCCCCCAAACTCATGATCTATGATGTCAGT
GATCGGCCCTCAGGGGTGTCTGATCGCTTCTCCGGCTCCAAGTCTGGCAACACGGCCTCCCTGATCATCTCTGGCCT
CCAGGCTGACGACGAGGCTGATTATTACTGCAGCTCATATGGGAGCAGCAGCACTCATGTGATTTTCGGCGGAGGGA
CCAAGGTGACCGTCCTAGGTGGAGGCGGTTCAGGCGGAGGTGGTTCCGGCGGTGGCGGCTCCGGTGGAGGCGGCTCT
CAGGTGCAATTGCAGGAGTCGGGGGGAGGCCTGGTCAAGCCTGGAGGGTCCCTGAGTCTCTCCTGTGCAGCCTCTGG
ATTCACCTTTAGTAGTTATTGGATGAGCTGGGTCCGCCAGGCTCCAGGGAAGGGGCTGGAGTGGGTGGCCAACATAA
ACCGCGATGGAAGTGCGAGTTACTATGTGGACTCTGTGAAGGGCCGATTCACCATCTCCAGAGACGACGCCAAGAAC
TCACTGTATCTGCAAATGAACAGCCTGAGAGCTGAGGACACGGCTGTGTATTACTGTGCGAGAGATCGTGGGGTGGG
CTACTTCGATCTCTGGGGCCGTGGCACCCTGGTCACCGTCTCTAGCTGA
>SEQ ID 326 SI-77H4 chain B aa
ENVLTQSPASLSASPGERVTITCSASSSVSYMHWYQQKPGQAPKLWIYDTSKLASGVPSRFSGSGSGNDHTLTISSM
EPEDFATYYCFQGSVYPFTFGQGTKVTVLGGGGSGGGGSGGGGSGGGGSQVTLKESGPGLVQPGQTLSLTCAFSGFS
LSTSGMGVGWIRQPPGKGLEWLAHIWWDDDKRYNPALKSRLTISKDTSKNQVYLQMNSLDAEDTAVYYCARMELWSY
YFDYWGQGTLVTVSSGGGGSGGGGSEIVLTQSPSTLSVSPGERATFSCRASQSIGTNIHWYQQKPGKPPRLLIKYAS
ESISGIPDRFSGSGSGTEFTLTISSVQSEDFAVYYCQQNNNWPTTFGCGTKLTVLRTVAAPSVFIFPPSDEQLKSGT
ASVVCLLNNFYPREAKVQWKVDNALQSGNSQESVTEQDSKDSTYSLSSTLTLSKADYEKHKVYACEVTHQGLSSPVT
KSFNRGECGGGGSGGGGSGGGGSQSALTQPASVSGSPGQSITISCTGTSSDVGGYNFVSWYQQHPGKAPKLMIYDVS
DRPSGVSDRFSGSKSGNTASLIISGLQADDEADYYCSSYGSSSTHVIFGGGTKVTVLGGGGSGGGGSGGGGSGGGGS
QVQLQESGGGLVKPGGSLSLSCAASGFTFSSYWMSWVRQAPGKGLEWVANINRDGSASYYVDSVKGRFTISRDDAKN
SLYLQMNSLRAEDTAVYYCARDRGVGYFDLWGRGTLVTVSS
>SEQ ID 327 SI-77H5 chain A nt
GAAATCGTTATGACGCAGAGTCCCTCCACGCTCTCCGCTAGTGTCGGGGATCGCGTCATTATCACATGCCAGGCCTC
CGAGTCAATCAGCAGCTGGCTTGCATGGTATCAACAGAAGCCGGGAAAAGCTCCTAAATTGCTGATCTATGAAGCGT
CAAAATTGGCGTCTGGTGTCCCATCTAGGTTCTCCGGCTCTGGGTCTGGTGCGGAATTTACTTTGACAATCTCCAGT
CTTCAACCAGACGATTTCGCTACCTACTACTGCCAAGGGTATTTCTATTTTATAAGCCGGACATATGTAAACTCCTT
CGGCCAAGGAACAAAGTTGACTGTTCTTGGTGGCGGAGGCAGTGGTGGCGGGGGCAGCGGAGGTGGTGGTTCAGGGG
GTGGTGGGAGCGAAGTCCAATTGGTAGAAAGTGGCGGTGGTCTGGTGCAACCTGGTGGATCTCTTCGCCTCTCATGC
GCCGCTAGTGGCTTTACTATTTCAACTAATGCGATGAGCTGGGTTCGCCAGGCCCCCGGCAAAGGACTTGAGTGGGT
CGGCGTCATCACCGGCAGGGACATTACATACTATGCGAGTTGGGCAAAGGGCAGGTTCACGATTAGCCGCGATACTT
CAAAGAATACCGTTTACCTTCAAATGAATAGCTTGAGGGCGGAAGACACAGCTGTGTATTACTGCGCGAGGGATGGA
GGTAGTTCCGCCATAACTTCCAACAACATATGGGGACAAGGCACGCTGGTTACTGTCTCGAGTGGCGGTGGAGGGTC
CGGCGGTGGTGGATCACAGGTGCAGCTGAAGCAGTCAGGACCTGGCCTAGTGCAGCCCTCACAGAGCCTGTCCATCA
CCTGCACAGTCTCTGGTTTCTCATTAACTAACTATGGTGTACACTGGGTTCGCCAGTCTCCAGGAAAGTGTCTGGAG
TGGCTGGGAGTGATATGGAGTGGTGGAAACACAGACTATAATACACCTTTCACATCCAGACTGAGCATCAACAAGGA
CAATTCCAAGAGCCAAGTTTTCTTTAAAATGAACAGTCTGCAATCTAATGACACAGCCATATATTACTGTGCCAGAG
CCCTCACCTACTATGATTACGAGTTTGCTTACTGGGGCCAAGGGACTCTGGTCACTGTCTCGAGTGCTAGCACCAAG
GGCCCATCGGTCTTCCCCCTGGCACCCTCCTCCAAGAGCACCTCTGGGGGCACAGCGGCCCTGGGCTGCCTGGTCAA
GGACTACTTCCCCGAACCGGTGACGGTGTCGTGGAACTCAGGCGCCCTGACCAGCGGCGTGCACACCTTCCCGGCTG
TCCTACAGTCCTCAGGACTCTACTCCCTCAGCAGCGTGGTGACCGTGCCCTCCAGCAGCTTGGGCACCCAGACCTAC
ATCTGCAACGTGAATCACAAGCCCAGCAACACCAAGGTGGACAAGAGAGTTGAGCCCAAATCTTGTGACAAAACTCA
CACATGCCCACCGTGCCCAGCACCTGAAGCCGCGGGGGCACCGTCAGTCTTCCTCTTCCCCCCAAAACCCAAGGACA
CCCTCATGATCTCCCGGACCCCTGAGGTCACATGCGTGGTGGTGGACGTGAGCCACGAAGACCCTGAGGTCAAGTTC
AACTGGTACGTGGACGGCGTGGAGGTGCATAATGCCAAGACAAAGCCGCGGGAGGAGCAGTACAACAGCACGTACCG
TGTGGTCAGCGTCCTCACCGTCCTGCACCAGGACTGGCTGAATGGCAAGGAGTACAAGTGCGCGGTCTCCAACAAAG
CCCTCCCAGCCCCCATCGAGAAAACCATCTCCAAAGCCAAAGGGCAGCCCCGAGAACCACAGGTGTACACCCTGCCC
CCATCCCGGGATGAGCTGACCAAGAACCAGGTCAGCCTGACCTGCCTGGTCAAAGGCTTCTATCCCAGCGACATCGC
CGTGGAGTGGGAGAGCAATGGGCAGCCGGAGAACAACTACAAGACCACGCCTCCCGTGCTGGACTCCGACGGCTCCT
TCTTCCTCTATAGCAAGCTCACCGTGGACAAGAGCAGGTGGCAGCAGGGGAACGTCTTCTCATGCTCCGTGATGCAT
GAGGCTCTGCACAACCACTACACGCAGAAGAGCCTCTCCCTGTCTCCGGGTGGCGGTGGAGGGTCCGGCGGTGGTGG
ATCCGAGGTGCAGCTGTTGGAGTCTGGGGGAGGCTTGGTACAGCCTGGGGGGTCCCTGAGACTCTCCTGTGCAGCCT
CTGGATTCTCCTTCAGTAGCGGGTACGACATGTGCTGGGTCCGCCAGGCTCCAGGGAAGGGGCTGGAGTGGATCGCA
TGCATTGCTGCTGGTAGTGCTGGTATCACTTACGACGCGAACTGGGCGAAAGGCCGGTTCACCATCTCCAGAGACAA
TTCCAAGAACACGCTGTATCTGCAAATGAACAGCCTGAGAGCCGAGGACACGGCCGTATATTACTGTGCGAGATCGG
CGTTTTCGTTCGACTACGCCATGGACCTCTGGGGCCAGGGAACCCTGGTCACCGTGTCGAGCGGTGGAGGCGGATCT
GGCGGAGGTGGTTCCGGCGGTGGCGGCTCCGGTGGAGGCGGCTCTGACATCCAGATGACCCAGTCTCCTTCCACCCT
GTCTGCATCTGTAGGAGACAGAGTCACCATCACTTGCCAGGCCAGTCAGAGCATTAGTTCCCACTTAAACTGGTATC
AGCAGAAACCAGGGAAAGCCCCTAAGCTCCTGATCTATAAGGCATCCACTCTGGCATCTGGGGTCCCATCAAGGTTC
AGCGGCAGTGGATCTGGGACAGAATTTACTCTCACCATCAGCAGCCTGCAGCCTGATGATTTTGCAACTTATTACTG
CCAACAGGGTTATAGTTGGGGTAATGTTGATAATGTTTTCGGCGGAGGGACCAAGGTGGAGATCAAAGGCGGTGGAG
GGTCCGGCGGTGGTGGCTCCGGACGGTCGCTGGTGGAGTCTGGGGGAGGCTTGGTCCAGCCTGGGGGGTCCCTGAGA
CTCTCCTGTACTGCCTCTGGATTCACCATCAGTAGCTACCACATGCAGTGGGTCCGCCAGGCTCCAGGGAAGGGGCT
GGAGTACATCGGAACCATTAGTAGTGGTGGTAATGTATACTACGCAAGCTCCGCTAGAGGCAGATTCACCATCTCCA
GACCCTCGTCCAAGAACACGGTGGATCTTCAAATGAACAGCCTGAGAGCCGAGGACACGGCTGTGTATTACTGTGCG
AGAGACTCTGGTTATAGTGATCCTATGTGGGGCCAGGGAACCCTGGTCACCGTCTCTTCAGGCGGTGGCGGTAGTGG
GGGAGGCGGTTCTGGCGGCGGAGGGTCCGGCGGTGGAGGATCAGACGTTGTGATGACCCAGTCTCCATCTTCCGTGT
CTGCATCTGTAGGAGACAGAGTCACCATCACCTGTCAGGCCAGTCAGAACATTAGGACTTACTTATCCTGGTATCAG
CAGAAACCAGGGAAAGCCCCTAAGCTCCTGATCTATGCTGCAGCCAATCTGGCATCTGGGGTCCCATCAAGGTTCAG
CGGCAGTGGATCTGGGACAGATTTCACTCTCACCATCAGCGACCTGGAGCCTGGCGATGCTGCAACTTACTATTGTC
AGTCTACCTATCTTGGTACTGATTATGTTGGCGGTGCTTTCGGCGGAGGGACCAAGGTGGAGATCAAATGA
>SEQ ID 328 SI-77H5 chain A aa
EIVMTQSPSTLSASVGDRVIITCQASESISSWLAWYQQKPGKAPKLLIYEASKLASGVPSRFSGSGSGAEFTLTISS
LQPDDFATYYCQGYFYFISRTYVNSFGQGTKLTVLGGGGSGGGGSGGGGSGGGGSEVQLVESGGGLVQPGGSLRLSC
AASGFTISTNAMSWVRQAPGKGLEWVGVITGRDITYYASWAKGRFTISRDTSKNTVYLQMNSLRAEDTAVYYCARDG
GSSAITSNNIWGQGTLVTVSSGGGGSGGGGSQVQLKQSGPGLVQPSQSLSITCTVSGFSLTNYGVHWVRQSPGKCLE
WLGVIWSGGNTDYNTPFTSRLSINKDNSKSQVFFKMNSLQSNDTAIYYCARALTYYDYEFAYWGQGTLVTVSSASTK
GPSVFPLAPSSKSTSGGTAALGCLVKDYFPEPVTVSWNSGALTSGVHTFPAVLQSSGLYSLSSVVTVPSSSLGTQTY
ICNVNHKPSNTKVDKRVEPKSCDKTHTCPPCPAPEAAGAPSVFLFPPKPKDTLMISRTPEVTCVVVDVSHEDPEVKF
NWYVDGVEVHNAKTKPREEQYNSTYRVVSVLTVLHQDWLNGKEYKCAVSNKALPAPIEKTISKAKGQPREPQVYTLP
PSRDELTKNQVSLTCLVKGFYPSDIAVEWESNGQPENNYKTTPPVLDSDGSFFLYSKLTVDKSRWQQGNVFSCSVMH
EALHNHYTQKSLSLSPGGGGGSGGGGSEVQLLESGGGLVQPGGSLRLSCAASGFSFSSGYDMCWVRQAPGKGLEWIA
CIAAGSAGITYDANWAKGRFTISRDNSKNTLYLQMNSLRAEDTAVYYCARSAFSFDYAMDLWGQGTLVTVSSGGGGS
GGGGSGGGGSGGGGSDIQMTQSPSTLSASVGDRVTITCQASQSISSHLNWYQQKPGKAPKLLIYKASTLASGVPSRF
SGSGSGTEFTLTISSLQPDDFATYYCQQGYSWGNVDNVFGGGTKVEIKGGGGSGGGGSGRSLVESGGGLVQPGGSLR
LSCTASGFTISSYHMQWVRQAPGKGLEYIGTISSGGNVYYASSARGRFTISRPSSKNTVDLQMNSLRAEDTAVYYCA
RDSGYSDPMWGQGTLVTVSSGGGGSGGGGSGGGGSGGGGSDVVMTQSPSSVSASVGDRVTITCQASQNIRTYLSWYQ
QKPGKAPKLLIYAAANLASGVPSRFSGSGSGTDFTLTISDLEPGDAATYYCQSTYLGTDYVGGAFGGGTKVEIK
>SEQ ID 329 SI-77H5 chain B nt
GAAAATGTATTGACACAGAGCCCCGCCTCCCTCAGTGCCTCACCTGGGGAAAGGGTAACTATCACTTGCTCTGCATC
AAGCAGCGTCTCATACATGCATTGGTATCAACAAAAGCCTGGACAGGCCCCCAAGCTCTGGATATACGATACGAGCA
AGCTGGCTTCCGGCGTACCTAGCCGCTTCAGTGGTTCCGGCTCAGGCAACGATCACACCCTTACGATTTCCAGTATG
GAACCCGAAGATTTTGCAACTTATTATTGTTTCCAGGGGAGCGTGTACCCATTCACTTTCGGGCAGGGGACAAAAGT
GACCGTCCTAGGCGGTGGCGGTAGTGGGGGAGGCGGTTCTGGCGGCGGAGGGTCCGGCGGTGGAGGATCACAGGTCA
CATTGAAGGAATCTGGCCCCGGCCTTGTTCAGCCAGGACAGACCCTTAGCCTCACCTGTGCCTTCAGTGGTTTTTCT
CTTAGCACTAGCGGTATGGGGGTCGGCTGGATTCGGCAGCCTCCCGGCAAAGGTCTTGAGTGGTTGGCTCACATTTG
GTGGGACGACGACAAACGGTATAATCCTGCCTTGAAAAGTCGGCTGACCATTAGTAAGGATACCTCAAAAAATCAAG
TGTACTTGCAAATGAATAGCCTTGACGCCGAGGATACGGCTGTATATTATTGCGCTCGGATGGAACTCTGGTCTTAC
TACTTTGATTATTGGGGGCAGGGGACTCTCGTCACGGTCTCGAGTGGCGGTGGAGGGTCCGGCGGTGGTGGATCAGA
CATCTTGCTGACTCAGTCTCCAGTCATCCTGTCTGTGAGTCCAGGAGAAAGAGTCAGTTTCTCCTGCAGGGCCAGTC
AGAGTATTGGCACAAACATACACTGGTATCAGCAAAGAACAAATGGTTCTCCAAGGCTTCTCATAAAGTATGCTTCT
GAGTCTATCTCTGGGATTCCTTCCAGGTTTAGTGGCAGTGGATCAGGGACAGATTTTACTCTTAGCATCAACAGTGT
GGAGTCTGAAGATATTGCAGATTATTACTGTCAACAAAATAATAACTGGCCAACCACGTTCGGTTGTGGGACCAAGC
TGGAGCTGAAACGTACGGTGGCTGCACCATCTGTCTTCATCTTCCCGCCATCTGATGAGCAGTTGAAATCTGGAACT
GCCTCTGTTGTGTGCCTGCTGAATAACTTCTATCCCAGAGAGGCCAAAGTACAGTGGAAGGTGGATAACGCCCTCCA
ATCGGGTAACTCCCAGGAGAGTGTCACAGAGCAGGACAGCAAGGACAGCACCTACAGCCTCAGCAGCACCCTGACGC
TGAGCAAAGCAGACTACGAGAAACACAAAGTCTACGCCTGCGAAGTCACCCATCAGGGCCTGAGCTCGCCCGTCACA
AAGAGCTTCAACAGGGGAGAGTGTGGCGGTGGCGGTAGCGGTGGCGGCGGAAGTGGTGGCGGAGGATCCCAGTCTGC
CCTGACTCAGCCTGCCTCCGTGTCTGGGTCTCCTGGACAGTCGATCACCATCTCCTGCACTGGAACCAGCAGTGACG
TTGGTGGTTATAACTTTGTCTCCTGGTACCAACAACACCCAGGCAAAGCCCCCAAACTCATGATCTATGATGTCAGT
GATCGGCCCTCAGGGGTGTCTGATCGCTTCTCCGGCTCCAAGTCTGGCAACACGGCCTCCCTGATCATCTCTGGCCT
CCAGGCTGACGACGAGGCTGATTATTACTGCAGCTCATATGGGAGCAGCAGCACTCATGTGATTTTCGGCGGAGGGA
CCAAGGTGACCGTCCTAGGTGGAGGCGGTTCAGGCGGAGGTGGTTCCGGCGGTGGCGGCTCCGGTGGAGGCGGCTCT
CAGGTGCAATTGCAGGAGTCGGGGGGAGGCCTGGTCAAGCCTGGAGGGTCCCTGAGTCTCTCCTGTGCAGCCTCTGG
ATTCACCTTTAGTAGTTATTGGATGAGCTGGGTCCGCCAGGCTCCAGGGAAGGGGCTGGAGTGGGTGGCCAACATAA
ACCGCGATGGAAGTGCGAGTTACTATGTGGACTCTGTGAAGGGCCGATTCACCATCTCCAGAGACGACGCCAAGAAC
TCACTGTATCTGCAAATGAACAGCCTGAGAGCTGAGGACACGGCTGTGTATTACTGTGCGAGAGATCGTGGGGTGGG
CTACTTCGATCTCTGGGGCCGTGGCACCCTGGTCACCGTCTCTAGCTGA
>SEQ ID 330 SI-77H5 chain B aa
ENVLTQSPASLSASPGERVTITCSASSSVSYMHWYQQKPGQAPKLWIYDTSKLASGVPSRFSGSGSGNDHTLTISSM
EPEDFATYYCFQGSVYPFTFGQGTKVTVLGGGGSGGGGSGGGGSGGGGSQVTLKESGPGLVQPGQTLSLTCAFSGFS
LSTSGMGVGWIRQPPGKGLEWLAHIWWDDDKRYNPALKSRLTISKDTSKNQVYLQMNSLDAEDTAVYYCARMELWSY
YFDYWGQGTLVTVSSGGGGSGGGGSDILLTQSPVILSVSPGERVSFSCRASQSIGTNIHWYQQRTNGSPRLLIKYAS
ESISGIPSRFSGSGSGTDFTLSINSVESEDIADYYCQQNNNWPTTFGCGTKLELKRTVAAPSVFIFPPSDEQLKSGT
ASVVCLLNNFYPREAKVQWKVDNALQSGNSQESVTEQDSKDSTYSLSSTLTLSKADYEKHKVYACEVTHQGLSSPVT
KSFNRGECGGGGSGGGGSGGGGSQSALTQPASVSGSPGQSITISCTGTSSDVGGYNFVSWYQQHPGKAPKLMIYDVS
DRPSGVSDRFSGSKSGNTASLIISGLQADDEADYYCSSYGSSSTHVIFGGGTKVTVLGGGGSGGGGSGGGGSGGGGS
QVQLQESGGGLVKPGGSLSLSCAASGFTFSSYWMSWVRQAPGKGLEWVANINRDGSASYYVDSVKGRFTISRDDAKN
SLYLQMNSLRAEDTAVYYCARDRGVGYFDLWGRGTLVTVSS
>SEQ ID 331 SI-55H12 chain A nt
GAAATCGTCCTTACACAATCTCCTAGCACACTGAGTGTGAGCCCCGGCGAACGCGCGACTTTCTCTTGCAGGGCAAG
TCAATCCATAGGGACTAATATACATTGGTATCAACAAAAGCCAGGTAAACCACCCAGGCTTTTGATTAAGTATGCAA
GTGAGTCTATTTCCGGTATCCCTGACCGCTTCTCTGGATCAGGCAGTGGCACAGAGTTCACACTCACCATATCTAGT
GTGCAATCAGAGGACTTCGCCGTGTATTACTGCCAACAGAATAATAACTGGCCGACTACCTTCGGACCCGGTACAAA
GCTGACCGTTTTAGGCGGTGGCGGTAGTGGGGGAGGCGGTTCTGGCGGCGGAGGGTCCGGCGGTGGAGGATCACAAG
TACAGTTGCAGCAATCCGGTCCCGGTCTCGTCAAACCGAGTGAGACGCTTAGTATAACGTGTACTGTTTCAGGCTTT
AGCCTTACGAACTATGGAGTTCACTGGATTCGGCAGGCACCCGGCAAAGGTTTGGAATGGCTGGGTGTTATTTGGTC
AGGTGGAAATACAGACTATAACACCCCCTTTACAAGTCGGTTCACAATTACGAAAGATAATTCCAAAAATCAAGTTT
ATTTCAAGTTGAGATCCGTCCGCGCGGACGACACTGCGATCTACTATTGTGCGAGGGCACTGACCTACTACGATTAC
GAATTTGCGTATTGGGGGCAAGGGACTCTTGTAACAGTCTCGAGCGGTGGAGGCGGATCTGGCGGAGGTGGTTCCGG
CGGTGGCGGCTCCGGTGGAGGCGGCTCTGAGGTGCAGCTGGTGGAGTCTGGGGGAGGCTTGGTCCAGCCTGGGGGGT
CCCTGAGACTCTCCTGTGCAGCCTCTGGATTCACCATCAGTACCAATGCAATGAGCTGGGTCCGCGAGGCTCCAGGG
AAGGGCCTGGAGTGGATCGGAGTCATTACTGGTCGTGATATCACATACTACGCGAGCTGGGCGAAAGGCAGATTCAC
CATCTCCAGAGACAATTCCAAGAACACGCTGTATCTTCAAATGAACAGCCTGAGAGCCGAGGACACGGCTGTGTATT
ACTGTGCGAGAGACGGTGGTTCTTCTGCTATTACTAGTAACAACATTTGGGGCCAGGGAACCCTGGTCACCGTGTCC
TCAGCTAGCACCAAGGGCCCATCGGTCTTCCCCCTGGCACCCTCCTCCAAGAGCACCTCTGGGGGCACAGCGGCCCT
GGGCTGCCTGGTCAAGGACTACTTCCCCGAACCGGTGACGGTGTCGTGGAACTCAGGCGCCCTGACCAGCGGCGTGC
ACACCTTCCCGGCTGTCCTACAGTCCTCAGGACTCTACTCCCTCAGCAGCGTGGTGACCGTGCCCTCCAGCAGCTTG
GGCACCCAGACCTACATCTGCAACGTGAATCACAAGCCCAGCAACACCAAGGTGGACAAGAGAGTTGAGCCCAAATC
TTGTGACAAAACTCACACATGCCCACCGTGCCCAGCACCTGAAGCCGCGGGGGCACCGTCAGTCTTCCTCTTCCCCC
CAAAACCCAAGGACACCCTCATGATCTCCCGGACCCCTGAGGTCACATGCGTGGTGGTGGACGTGAGCCACGAAGAC
CCTGAGGTCAAGTTCAACTGGTACGTGGACGGCGTGGAGGTGCATAATGCCAAGACAAAGCCGCGGGAGGAGCAGTA
CAACAGCACGTACCGTGTGGTCAGCGTCCTCACCGTCCTGCACCAGGACTGGCTGAATGGCAAGGAGTACAAGTGCG
CGGTCTCCAACAAAGCCCTCCCAGCCCCCATCGAGAAAACCATCTCCAAAGCCAAAGGGCAGCCCCGAGAACCACAG
GTGTACACCCTGCCCCCATCCCGGGATGAGCTGACCAAGAACCAGGTCAGCCTGACCTGCCTGGTCAAAGGCTTCTA
TCCCAGCGACATCGCCGTGGAGTGGGAGAGCAATGGGCAGCCGGAGAACAACTACAAGACCACGCCTCCCGTGCTGG
ACTCCGACGGCTCCTTCTTCCTCTATAGCAAGCTCACCGTGGACAAGAGCAGGTGGCAGCAGGGGAACGTCTTCTCA
TGCTCCGTGATGCATGAGGCTCTGCACAACCACTACACGCAGAAGAGCCTCTCCCTGTCTCCGGGTGGCGGTGGAGG
GTCCGGCGGTGGTGGATCCGAGGTGCAGCTGTTGGAGTCTGGGGGAGGCTTGGTACAGCCTGGGGGGTCCCTGAGAC
TCTCCTGTGCAGCCTCTGGATTCTCCTTCAGTAGCGGGTACGACATGTGCTGGGTCCGCCAGGCTCCAGGGAAGGGG
CTGGAGTGGATCGCATGCATTGCTGCTGGTAGTGCTGGTATCACTTACGACGCGAACTGGGCGAAAGGCCGGTTCAC
CATCTCCAGAGACAATTCCAAGAACACGCTGTATCTGCAAATGAACAGCCTGAGAGCCGAGGACACGGCCGTATATT
ACTGTGCGAGATCGGCGTTTTCGTTCGACTACGCCATGGACCTCTGGGGCCAGGGAACCCTGGTCACCGTGTCGAGC
GGTGGAGGCGGATCTGGCGGAGGTGGTTCCGGCGGTGGCGGCTCCGGTGGAGGCGGCTCTGACATCCAGATGACCCA
GTCTCCTTCCACCCTGTCTGCATCTGTAGGAGACAGAGTCACCATCACTTGCCAGGCCAGTCAGAGCATTAGTTCCC
ACTTAAACTGGTATCAGCAGAAACCAGGGAAAGCCCCTAAGCTCCTGATCTATAAGGCATCCACTCTGGCATCTGGG
GTCCCATCAAGGTTCAGCGGCAGTGGATCTGGGACAGAATTTACTCTCACCATCAGCAGCCTGCAGCCTGATGATTT
TGCAACTTATTACTGCCAACAGGGTTATAGTTGGGGTAATGTTGATAATGTTTTCGGCGGAGGGACCAAGGTGGAGA
TCAAAGGCGGTGGAGGGTCCGGCGGTGGTGGCTCCGGACGGTCGCTGGTGGAGTCTGGGGGAGGCTTGGTCCAGCCT
GGGGGGTCCCTGAGACTCTCCTGTACTGCCTCTGGATTCACCATCAGTAGCTACCACATGCAGTGGGTCCGCCAGGC
TCCAGGGAAGGGGCTGGAGTACATCGGAACCATTAGTAGTGGTGGTAATGTATACTACGCAAGCTCCGCTAGAGGCA
GATTCACCATCTCCAGACCCTCGTCCAAGAACACGGTGGATCTTCAAATGAACAGCCTGAGAGCCGAGGACACGGCT
GTGTATTACTGTGCGAGAGACTCTGGTTATAGTGATCCTATGTGGGGCCAGGGAACCCTGGTCACCGTCTCTTCAGG
CGGTGGCGGTAGTGGGGGAGGCGGTTCTGGCGGCGGAGGGTCCGGCGGTGGAGGATCAGACGTTGTGATGACCCAGT
CTCCATCTTCCGTGTCTGCATCTGTAGGAGACAGAGTCACCATCACCTGTCAGGCCAGTCAGAACATTAGGACTTAC
TTATCCTGGTATCAGCAGAAACCAGGGAAAGCCCCTAAGCTCCTGATCTATGCTGCAGCCAATCTGGCATCTGGGGT
CCCATCAAGGTTCAGCGGCAGTGGATCTGGGACAGATTTCACTCTCACCATCAGCGACCTGGAGCCTGGCGATGCTG
CAACTTACTATTGTCAGTCTACCTATCTTGGTACTGATTATGTTGGCGGTGCTTTCGGCGGAGGGACCAAGGTGGAG
ATCAAATGA
>SEQ ID 332 SI-55H12 chain A aa
EIVLTQSPSTLSVSPGERATFSCRASQSIGTNIHWYQQKPGKPPRLLIKYASESISGIPDRFSGSGSGTEFTLTISS
VQSEDFAVYYCQQNNNWPTTFGPGTKLTVLGGGGSGGGGSGGGGSGGGGSQVQLQQSGPGLVKPSETLSITCTVSGF
SLTNYGVHWIRQAPGKGLEWLGVIWSGGNTDYNTPFTSRFTITKDNSKNQVYFKLRSVRADDTAIYYCARALTYYDY
EFAYWGQGTLVTVSSGGGGSGGGGSGGGGSGGGGSEVQLVESGGGLVQPGGSLRLSCAASGFTISTNAMSWVREAPG
KGLEWIGVITGRDITYYASWAKGRFTISRDNSKNTLYLQMNSLRAEDTAVYYCARDGGSSAITSNNIWGQGTLVTVS
SASTKGPSVFPLAPSSKSTSGGTAALGCLVKDYFPEPVTVSWNSGALTSGVHTFPAVLQSSGLYSLSSVVTVPSSSL
GTQTYICNVNHKPSNTKVDKRVEPKSCDKTHTCPPCPAPEAAGAPSVFLFPPKPKDTLMISRTPEVTCVVVDVSHED
PEVKFNWYVDGVEVHNAKTKPREEQYNSTYRVVSVLTVLHQDWLNGKEYKCAVSNKALPAPIEKTISKAKGQPREPQ
VYTLPPSRDELTKNQVSLTCLVKGFYPSDIAVEWESNGQPENNYKTTPPVLDSDGSFFLYSKLTVDKSRWQQGNVFS
CSVMHEALHNHYTQKSLSLSPGGGGGSGGGGSEVQLLESGGGLVQPGGSLRLSCAASGFSFSSGYDMCWVRQAPGKG
LEWIACIAAGSAGITYDANWAKGRFTISRDNSKNTLYLQMNSLRAEDTAVYYCARSAFSFDYAMDLWGQGTLVTVSS
GGGGSGGGGSGGGGSGGGGSDIQMTQSPSTLSASVGDRVTITCQASQSISSHLNWYQQKPGKAPKLLIYKASTLASG
VPSRFSGSGSGTEFTLTISSLQPDDFATYYCQQGYSWGNVDNVFGGGTKVEIKGGGGSGGGGSGRSLVESGGGLVQP
GGSLRLSCTASGFTISSYHMQWVRQAPGKGLEYIGTISSGGNVYYASSARGRFTISRPSSKNTVDLQMNSLRAEDTA
VYYCARDSGYSDPMWGQGTLVTVSSGGGGSGGGGSGGGGSGGGGSDVVMTQSPSSVSASVGDRVTITCQASQNIRTY
LSWYQQKPGKAPKLLIYAAANLASGVPSRFSGSGSGTDFTLTISDLEPGDAATYYCQSTYLGTDYVGGAFGGGTKVE
IK
>SEQ ID 333 SI-55H12 chain B nt
GAAAATGTATTGACACAGAGCCCCGCCTCCCTCAGTGCCTCACCTGGGGAAAGGGTAACTATCACTTGCTCTGCATC
AAGCAGCGTCTCATACATGCATTGGTATCAACAAAAGCCTGGACAGGCCCCCAAGCTCTGGATATACGATACGAGCA
AGCTGGCTTCCGGCGTACCTAGCCGCTTCAGTGGTTCCGGCTCAGGCAACGATCACACCCTTACGATTTCCAGTATG
GAACCCGAAGATTTTGCAACTTATTATTGTTTCCAGGGGAGCGTGTACCCATTCACTTTCGGGCAGGGGACAAAAGT
GACCGTCCTAGGCGGTGGCGGTAGTGGGGGAGGCGGTTCTGGCGGCGGAGGGTCCGGCGGTGGAGGATCACAGGTCA
CATTGAAGGAATCTGGCCCCGGCCTTGTTCAGCCAGGACAGACCCTTAGCCTCACCTGTGCCTTCAGTGGTTTTTCT
CTTAGCACTAGCGGTATGGGGGTCGGCTGGATTCGGCAGCCTCCCGGCAAAGGTCTTGAGTGGTTGGCTCACATTTG
GTGGGACGACGACAAACGGTATAATCCTGCCTTGAAAAGTCGGCTGACCATTAGTAAGGATACCTCAAAAAATCAAG
TGTACTTGCAAATGAATAGCCTTGACGCCGAGGATACGGCTGTATATTATTGCGCTCGGATGGAACTCTGGTCTTAC
TACTTTGATTATTGGGGGCAGGGGACTCTCGTCACGGTCTCGAGTGGCGGTGGAGGGTCCGGCGGTGGTGGATCAGA
CGTCGTGATGACCCAGTCTCCTTCCACCCTGTCTGCATCTGTAGGAGACAGAGTCACCATCAATTGCCAAGCCAGTG
AGAGCATTAGCAGTTGGTTAGCCTGGTATCAGCAGAAACCAGGGAAAGCCCCTAAGCTCCTGATCTATGAAGCATCC
AAACTGGCATCTGGGGTCCCATCAAGGTTCAGCGGCAGTGGATCTGGGACAGAATTTACTCTCACCATCAGCAGCCT
GCAGCCTGATGATTTTGCAACTTATTACTGCCAAGGCTATTTTTATTTTATTAGTCGTACTTATGTAAATTCTTTCG
GCGGCGGGACCAAGGTGGAGATCAAACGTACGGTGGCTGCACCATCTGTCTTCATCTTCCCGCCATCTGATGAGCAG
TTGAAATCTGGAACTGCCTCTGTTGTGTGCCTGCTGAATAACTTCTATCCCAGAGAGGCCAAAGTACAGTGGAAGGT
GGATAACGCCCTCCAATCGGGTAACTCCCAGGAGAGTGTCACAGAGCAGGACAGCAAGGACAGCACCTACAGCCTCA
GCAGCACCCTGACGCTGAGCAAAGCAGACTACGAGAAACACAAAGTCTACGCCTGCGAAGTCACCCATCAGGGCCTG
AGCTCGCCCGTCACAAAGAGCTTCAACAGGGGAGAGTGTGGCGGTGGCGGTAGCGGTGGCGGCGGAAGTGGTGGCGG
AGGATCCCAGTCTGCCCTGACTCAGCCTGCCTCCGTGTCTGGGTCTCCTGGACAGTCGATCACCATCTCCTGCACTG
GAACCAGCAGTGACGTTGGTGGTTATAACTTTGTCTCCTGGTACCAACAACACCCAGGCAAAGCCCCCAAACTCATG
ATCTATGATGTCAGTGATCGGCCCTCAGGGGTGTCTGATCGCTTCTCCGGCTCCAAGTCTGGCAACACGGCCTCCCT
GATCATCTCTGGCCTCCAGGCTGACGACGAGGCTGATTATTACTGCAGCTCATATGGGAGCAGCAGCACTCATGTGA
TTTTCGGCGGAGGGACCAAGGTGACCGTCCTAGGTGGAGGCGGTTCAGGCGGAGGTGGTTCCGGCGGTGGCGGCTCC
GGTGGAGGCGGCTCTCAGGTGCAATTGCAGGAGTCGGGGGGAGGCCTGGTCAAGCCTGGAGGGTCCCTGAGTCTCTC
CTGTGCAGCCTCTGGATTCACCTTTAGTAGTTATTGGATGAGCTGGGTCCGCCAGGCTCCAGGGAAGGGGCTGGAGT
GGGTGGCCAACATAAACCGCGATGGAAGTGCGAGTTACTATGTGGACTCTGTGAAGGGCCGATTCACCATCTCCAGA
GACGACGCCAAGAACTCACTGTATCTGCAAATGAACAGCCTGAGAGCTGAGGACACGGCTGTGTATTACTGTGCGAG
AGATCGTGGGGTGGGCTACTTCGATCTCTGGGGCCGTGGCACCCTGGTCACCGTCTCTAGCTGA
>SEQ ID 334 SI-55H12 chain B aa
ENVLTQSPASLSASPGERVTITCSASSSVSYMHWYQQKPGQAPKLWIYDTSKLASGVPSRFSGSGSGNDHTLTISSM
EPEDFATYYCFQGSVYPFTFGQGTKVTVLGGGGSGGGGSGGGGSGGGGSQVTLKESGPGLVQPGQTLSLTCAFSGFS
LSTSGMGVGWIRQPPGKGLEWLAHIWWDDDKRYNPALKSRLTISKDTSKNQVYLQMNSLDAEDTAVYYCARMELWSY
YFDYWGQGTLVTVSSGGGGSGGGGSDVVMTQSPSTLSASVGDRVTINCQASESISSWLAWYQQKPGKAPKLLIYEAS
KLASGVPSRFSGSGSGTEFTLTISSLQPDDFATYYCQGYFYFISRTYVNSFGGGTKVEIKRTVAAPSVFIFPPSDEQ
LKSGTASVVCLLNNFYPREAKVQWKVDNALQSGNSQESVTEQDSKDSTYSLSSTLTLSKADYEKHKVYACEVTHQGL
SSPVTKSFNRGECGGGGSGGGGSGGGGSQSALTQPASVSGSPGQSITISCTGTSSDVGGYNFVSWYQQHPGKAPKLM
IYDVSDRPSGVSDRFSGSKSGNTASLIISGLQADDEADYYCSSYGSSSTHVIFGGGTKVTVLGGGGSGGGGSGGGGS
GGGGSQVQLQESGGGLVKPGGSLSLSCAASGFTFSSYWMSWVRQAPGKGLEWVANINRDGSASYYVDSVKGRFTISR
DDAKNSLYLQMNSLRAEDTAVYYCARDRGVGYFDLWGRGTLVTVSS

What is claimed is:

1. A multi-specific antibody-like protein having a N-terminal and a C-terminal, comprising in tandem from the N-terminal to the C-terminal,
a first binding domain (D1) at the N-terminal,
a Fab region as a second binding domain (D2) comprising a light chain,
a Fc region,
a third binding domain (D3) having a binding affinity to PD-L1, and
a fourth binding domain (D4) having a binding affinity to 4-1BB at the C-terminal,
wherein the light chain comprises a fifth binding domain (D5) covalently attached to the C-terminal and a sixth binding domain (D6) covalently attached to the N-terminal, and
wherein D1, D2, D5, and D6 each independently has a binding affinity to a tumor associated antigen (TAA) or CD3.

2. The multi-specific antibody-like protein of claim 1, wherein D1 or D2 has a binding affinity to CD3.

3. The multi-specific antibody-like protein of claim 1, comprising an amino acid sequence having sequence identity to SEQ ID NO. 176, 178, 106, 108, 332, 334, 324, 326, 328, or 330.

4. The multi-specific antibody-like protein of claim 1, wherein the D1, D3, D4, D5, and D6 is independently a scFv domain, a receptor, or a ligand.

5. The multi-specific antibody monomer of claim 1, wherein the D1 has a binding specificity against CD3, D2 has a binding specificity against EGFR, EGFRvIII, CD20, mesothelin, Claudin18.2, HER2, CD33or a combination thereof, D3 has a binding specificity against PD-L1, D4 has a binding specificity against 4-1BB, and D5 and D6 each independently has a binding specificity against a tumor associated antigen.

5. The multi-specific antibody monomer of claim 1, wherein D1 has a binding specificity against CD3, D2 has a binding specificity against a tumor associated antigen, D3 has a binding specificity against PD-L1, D4 has a binding specificity against 4-1BB, and D5 and D6 each independently has a binding specificity against NKG2D ligands, HER3, CD19 or a combination thereof.

7. The multi-specific antibody-like protein of claim 1, wherein the D1 has a binding specificity against EGFR, D2 has a binding specificity against CD3, D3 has a binding specificity against PD-L1, D4 has a binding specificity against 4-1BB, and D5 has a binding specificity against CD19, and D6 has a binding specificity against HER3.

8. The multi-specific antibody-like protein of claim 1, wherein the D1 has a binding specificity against EGFR, D2 has a binding specificity against CD3, D3 has a binding specificity against PD-L1, D4 has a binding specificity against 4-1BB, and D5 has a binding specificity against HER3, and D6 has a binding specificity against CD19.

9. The multi-specific antibody-like protein of claim 1, wherein the D1 has a binding specificity against CD3, D2 has a binding specificity against EGFR, D3 has a binding specificity against PD-L1, D4 has a binding specificity against 4-1BB, and D5 has a binding specificity against HER3, and D6 has a binding specificity against CD19.

10. A multi-specific antibody-like protein having a N-terminal and a C-terminal, comprising in tandem from the N-terminal to the C-terminal,
a first binding domain (D1) at the N-terminal,
a Fab region as a second binding domain (D2) comprising a light chain, wherein the light chain optionally comprises a fifth binding domain (D5) covalently attached to the C-terminal or a sixth binding domain (D6) covalently attached to the N-terminal,
a Fc region,
a third binding domain (D3), and
a fourth binding domain (D4) at the C-terminal,
wherein multi-specific antibody-like protein comprise an amino acid sequence having sequence identity to SEQ ID NO. 110, 112, 116, 118, 122, 124, 128, 130, 134, 136, 140, 142, 146, 148, 152, 154, 158, 160, 164, 166, 170, 172, 112,114, 118, 120, 124, 126, 130, 132, 136, 138, 142, 144, 148, 150, 154, 156, 160, 162, 166, 168, 172, 174, 34, 36, 38, 40, 42, 44, 46, 48, 50, 52, 54, 56, 302, 304, 306, or 308.

11. The multi-specific antibody-like protein of claim 10, wherein D2, D5, and D6 each independently has a binding affinity to a tumor associate antigen (TAA).

12. The multi-specific antibody-like protein of claim 10, wherein the D1 has a binding specificity against CD3, D2 has a binding specificity against a tumor-associated antigen, D3 has a binding specificity against PD-L1, and D4 has a binding specificity against 4-1BB.

13. The multi-specific antibody-like protein of claim 10, wherein the D1 has a binding specificity against CD3, D2 has a binding specificity against an antigen selected from a group consisting of EGFR, HER2, CD19, CD20, CD22, CD30, CD22, mesothelin, GD2, and Claudin 18.2, D3 has a binding specificity against PD-L1, and D4 has a binding specificity against 4-1BB.

14. The multi-specific antibody-like protein of claim 10, wherein the D1 has a binding specificity against CD3, D2 and D5 independently each has a binding specificity against a tumor-associated antigen, D3 has a binding specificity against PD-L1, and D4 has a binding specificity against 4-1BB.

15. The multi-specific antibody-like protein of claim 10, wherein the D1 has a binding specificity against CD3, D2 has a binding specificity against a tumor-associated antigen, D3 has a binding specificity against PD-L1, D4 has a binding specificity against 4-1BB, and D5 has a binding specificity against HER3.

16. The multi-specific antibody-like protein of claim 10, wherein the D1 has a binding specificity against CD3, D2 has a binding specificity against EGFR or EGFRvIII, D3 has a binding specificity against PD-L1, D4 has a binding specificity against 4-1BB, and D5 has a binding specificity against HER3.

17. The multi-specific antibody-like protein of claim 10, wherein the D1 has a binding specificity against CD3, D2 has a binding specificity against CD20, D3 has a binding specificity against PD-L1, D4 has a binding specificity against 4-1BB, and D5 has a binding specificity against CD19.

18. The multi-specific antibody-like protein of claim 10, wherein the D1 and D6 independently have a binding specificity against a tumor-associated antigen, D2 has a binding specificity against CD3, D3 has a binding specificity against PD-L1, and D4 has a binding specificity against 4-1BB.

19. The multi-specific antibody-like protein of claim 10, wherein the D1 has a binding specificity against EGFR, D2 has a binding specificity against CD3, D3 has a binding specificity against PD-L1, D4 has a binding specificity against 4-1BB, and D6 has a binding specificity against CD19.

20. A multi-specific antibody-like protein having a N-terminal and a C-terminal, comprising in tandem from the N-terminal to the C-terminal,
optionally a first binding domain (D1) at the N-terminal,
a second binding domain (D2) comprising a light chain, wherein the light chain optionally comprises a fifth binding domain (D5) covalently attached to the C-terminal, a sixth binding domain (D6) covalently attached to the N-terminal, or both,
a Fc region,
optionally a third binding domain (D3), and
optionally a fourth binding domain (D4) at the C-terminal,
wherein at least one of D1, D2, D3, D4, D5, and D6 is a NKG2D, and
wherein D1, D2, D3, D4, D5, and D6 each independently has a binding affinity to specificity against a T cell activating receptor, an immune cell receptor, an immune checkpoint molecule, a co-stimulation factor, a receptor of a leukocyte, a tumor antigen, a tumor associated antigen (TAA), a receptor of a tissue cell, a receptor of a cancer cell, or a combination thereof.

21. The multi-specific antibody-like protein of claim 20, wherein the D2 comprises a dimer connected to CL and CH1, wherein the dimer is NKG2D.

22. The multi-specific antibody-like protein of claim 20, comprising an amino acid sequence having sequence identity to SEQ ID NO. 196 or 198.

23. The multi-specific antibody-like protein of claim 20, wherein the binding domain for a T cell activating receptor is adjacent to the binding domain for a tumor associated antigen (TAA).

24. The multi-specific antibody-like protein of claim 20, wherein the D1, D2, D3, D4, D5 and D6 each independently has a binding specificity against an antigen selected from EGFR, HER2, HER3, EGFRvIII, ROR1, CD3, CD28, CEA, LMP1, LMP2A, Mesothelin, PSMA, EpCAM, glypican-3, gpA33, GD2, TROP2, NKG2D, NKG2D ligand, BCMA, CD19, CD20, CD33, CD123, CD22, CD30, PD-L1, PD1, OX40, 4-1BB, GITR, TIGIT, TIM-3, LAG-3, CTLA4, CD40, CD40L, VISTA, ICOS, BTLA, LIGHT, HVEM, CSF1R, CD73, CD39, CLDN18.2, DLL3, HLA-G, FcRH5, GPRC5D, LIV-1, MUC1, CD138, CD70, CD16, uPAR, Siglec-15, CD47, CD38, NKp46, PD-L2, CD160, LOX-1, SIRPα, CD27, and wherein the Fc domain comprises a human IgG Fc domain.

25. The multi-specific antibody-like protein of claim 20, wherein D1, D2, D3, and D4 each independently has a binding specificity against NKG2D ligands, CD3, PD-L1, 4-1BB or a combination thereof.

26. The multi-specific antibody-like protein of claim 20, comprising an amino acid sequence having sequence identity to SEQ ID NO. 2, 4, 6, 8, 10, 12, 14, 16, 18, 20, 22, 24, 26, 28, 58, 60, 62, 64, 66, 68, 70, 72, 74, 76, 184, 186, 188, 190, 192, 194, 196, 198, 200, 202, 204, 206, 208, 210, 78, 80, 82, 84, 86, 88, 30 or 32.

27. An isolated nucleic acid sequence, encoding an amino acid sequence of the multi-specific antibody-like protein of claim 1.

28. An expression vector, comprising the isolated nucleic acid sequence of claim 27.

29. A host cell comprising the isolated nucleic acid sequence of claim 28, wherein the host cell is a prokaryotic cell or a eukaryotic cell.

30. An immuno-conjugate comprising a cytotoxic agent or an imaging agent linked to the multi-specific antibody of claim 1 through a linker, wherein the linker comprises an ester bond, an ether bond, an amid bond, a disulphide bond, an imide bond, a sulfone bond, a phosphate bond, a phosphorus ester bond, a peptide bond, a hydrophobic poly(ethylene glycol) linker, or a combination thereof.

31. A pharmaceutical composition, comprising a pharmaceutically acceptable carrier and one of the multi-specific antibodies of claim 1.

32. A method of treating a human subject with a cancer, an autoimmune disease, or an infectious disease comprising administering to the subject an effective amount of the multi-specific antibody-like protein of claim 1.

33. (canceled)

The application's sequence listing, which the Patent Office published only in electronic form, follows.

SEQUENCE LISTING (308 sequences)

SEQ ID NO: 1 - DNA, 3834 bp, Artificial Sequence
  Synthesized
tttcttaattcccttttcaaccaagaggttcagatccccttgactgaaagctattgcggcccttgtccgaaaaactggatatgttacaagaataattgttaccaattcttcgacgaaagcaagaactggtatgagagtcaggcgtcttgtatgagtcagaatgccagcctgcttaaggtttattcaaaagaagaccaggatctgcttaagttggtaaagagctaccactggatggggctggtacatatcccaacgaatgggtcatggcagtgggaggacggttctattctgagtccaaatctcctgacgatcatcgaaatgcagaaaggggactgtgccctgtatgcatcatccttcaaggggtacatcgagaactgcagtaccccaaatacctacatttgtatgcaaagaacggttggaggcggtggctcaggcggaggcggctcaggaggtggcggttcaggaggcggcggatctttcctaaactcattattcaaccaagaagttcaaattcccttgaccgaaagttactgtggcccatgtcctaaaaactggatatgttacaaaaataactgctaccaattttttgatgagagtaaaaactggtatgagagccaggcttcttgtatgtctcaaaatgccagccttctgaaagtatacagcaaagaggaccaggatttacttaaactggtgaagtcatatcattggatgggactagtacacattccaacaaatggatcttggcagtgggaagatggctccattctctcacccaacctactaacaataattgaaatgcagaagggagactgtgcactctatgcctcgagctttaaaggctatatagaaaactgttcaactccaaatacgtacatctgcatgcaaaggactgtggtcgacggcggtggagggtccggcggtggtggatcagaggtgcagctggtggagtctgggggaggcttggtccagcctggggggtccctgagactctcctgtgcagcctctggattcaccatcagtaccaatgcaatgagctgggtccgccaggctccagggaaggggctggagtggatcggagtcattactggtcgtgatatcacatactacgcgagctgggcgaaaggcagattcaccatctccagagacaattccaagaacacgctgtatcttcaaatgaacagcctgagagccgaggacacggctgtgtattactgtgcgagagacggtggttcttctgctattactagtaacaacatttggggccagggaaccctggtcaccgtgtcctcagctagcaccaagggcccatcggtcttccccctggcaccctcctccaagagcacctctgggggcacagcggccctgggctgcctggtcaaggactacttccccgaaccggtgacggtgtcgtggaactcaggcgccctgaccagcggcgtgcacaccttcccggctgtcctacagtcctcaggactctactccctcagcagcgtggtgaccgtgccctccagcagcttgggcacccagacctacatctgcaacgtgaatcacaagcccagcaacaccaaggtggacaagagagttgagcccaaatcttgtgacaaaactcacacatgcccaccgtgcccagcacctgaagccgcgggggcaccgtcagtcttcctcttccccccaaaacccaaggacaccctcatgatctcccggacccctgaggtcacatgcgtggtggtggacgtgagccacgaagaccctgaggtcaagttcaactggtacgtggacggcgtggaggtgcataatgccaagacaaagccgcgggaggagcagtacaacagcacgtaccgtgtggtcagcgtcctcaccgtcctgcaccaggactggctgaatggcaaggagtacaagtgcgcggtctccaacaaagccctcccagcccccatcgagaaaaccatctccaaagccaaagggcagccccgagaaccacaggtgtacaccctgcccccatcccgggatgagctgaccaagaaccaggtcagcctgacctgcctggtcaaaggcttctatcccagcgacatcgccgtggagtgggagagcaatgggcagccggagaacaactacaagaccacgcctcccgtgctggactccgacggctccttcttcctctatagcaagctcaccgtggacaagagcaggtggcagcaggggaacgtcttctcatgctccgtgatgcatgaggctctgcacaaccactacacgcagaagagcctctccctgtctccgggtggcggtggagggtccggcggtggtggatccgaggtgcagctgttggagtctgggggaggcttggtacagcctggggggtccctgagactctcctgtgcagcctctggattctccttcagtagcgggtacgacatgtgctgggtccgccaggctccagggaaggggctggagtggatcgcatgcattgctgctggtagtgctggtatcacttacgacgcgaactgggcgaaaggccggttcaccatctccagagacaattccaagaacacgctgtatctgcaaatgaacagcctgagagccgaggacacggccgtatattactgtgcgagatcggcgttttcgttcgactacgccatggacctctggggccagggaaccctggtcaccgtctcgagcggtggaggcggatctggcggaggtggttccggcggtggcggctccggtggaggcggctctgacatccagatgacccagtctccttccaccctgtctgcatctgtaggagacagagtcaccatcacttgccaggccagtcagagcattagttcccacttaaactggtatcagcagaaaccagggaaagcccctaagctcctgatctataaggcatccactctggcatctggggtcccatcaaggttcagcggcagtggatctgggacagaatttactctcaccatcagcagcctgcagcctgatgattttgcaacttattactgccaacagggttatagttggggtaatgttgataatgttttcggcggagggaccaaggtggagatcaaaggcggtggagggtccggcggtggtggctccggacggtcgctggtggagtctgggggaggcttggtccagcctggggggtccctgagactctcctgtactgcctctggattcaccatcagtagctaccacatgcagtgggtccgccaggctccagggaaggggctggagtacatcggaaccattagtagtggtggtaatgtatactacgcaagctccgctagaggcagattcaccatctccagaccctcgtccaagaacacggtggatcttcaaatgaacagcctgagagccgaggacacggctgtgtattactgtgcgagagactctggttatagtgatcctatgtggggccagggaaccctggtcaccgtctcttcaggcggtggcggtagtgggggaggcggttctggcggcggagggtccggcggtggaggatcagacgttgtgatgacccagtctccatcttccgtgtctgcatctgtaggagacagagtcaccatcacctgtcaggccagtcagaacattaggacttacttatcctggtatcagcagaaaccagggaaagcccctaagctcctgatctatgctgcagccaatctggcatctggggtcccatcaaggttcagcggcagtggatctgggacagatttcactctcaccatcagcgacctggagcctggcgatgctgcaacttactattgtcagtctacctatcttggtactgattatgttggcggtgctttcggcggagggaccaaggtggagatcaaa

SEQ ID NO: 2 - protein, 1278 aa, Artificial Sequence
  Synthesized
FLNSLFNQEVQIPLTESYCGPCPKNWICYKNNCYQFFDESKNWYESQASCMSQNASLLKVYSKEDQDLLKLVKSYHWMGLVHIPTNGSWQWEDGSILSPNLLTIIEMQKGDCALYASSFKGYIENCSTPNTYICMQRTVGGGGSGGGGSGGGGSGGGGSFLNSLFNQEVQIPLTESYCGPCPKNWICYKNNCYQFFDESKNWYESQASCMSQNASLLKVYSKEDQDLLKLVKSYHWMGLVHIPTNGSWQWEDGSILSPNLLTIIEMQKGDCALYASSFKGYIENCSTPNTYICMQRTVVDGGGGSGGGGSEVQLVESGGGLVQPGGSLRLSCAASGFTISTNAMSWVRQAPGKGLEWIGVITGRDITYYASWAKGRFTISRDNSKNTLYLQMNSLRAEDTAVYYCARDGGSSAITSNNIWGQGTLVTVSSASTKGPSVFPLAPSSKSTSGGTAALGCLVKDYFPEPVTVSWNSGALTSGVHTFPAVLQSSGLYSLSSVVTVPSSSLGTQTYICNVNHKPSNTKVDKRVEPKSCDKTHTCPPCPAPEAAGAPSVFLFPPKPKDTLMISRTPEVTCVVVDVSHEDPEVKFNWYVDGVEVHNAKTKPREEQYNSTYRVVSVLTVLHQDWLNGKEYKCAVSNKALPAPIEKTISKAKGQPREPQVYTLPPSRDELTKNQVSLTCLVKGFYPSDIAVEWESNGQPENNYKTTPPVLDSDGSFFLYSKLTVDKSRWQQGNVFSCSVMHEALHNHYTQKSLSLSPGGGGGSGGGGSEVQLLESGGGLVQPGGSLRLSCAASGFSFSSGYDMCWVRQAPGKGLEWIACIAAGSAGITYDANWAKGRFTISRDNSKNTLYLQMNSLRAEDTAVYYCARSAFSFDYAMDLWGQGTLVTVSSGGGGSGGGGSGGGGSGGGGSDIQMTQSPSTLSASVGDRVTITCQASQSISSHLNWYQQKPGKAPKLLIYKASTLASGVPSRFSGSGSGTEFTLTISSLQPDDFATYYCQQGYSWGNVDNVFGGGTKVEIKGGGGSGGGGSGRSLVESGGGLVQPGGSLRLSCTASGFTISSYHMQWVRQAPGKGLEYIGTISSGGNVYYASSARGRFTISRPSSKNTVDLQMNSLRAEDTAVYYCARDSGYSDPMWGQGTLVTVSSGGGGSGGGGSGGGGSGGGGSDVVMTQSPSSVSASVGDRVTITCQASQNIRTYLSWYQQKPGKAPKLLIYAAANLASGVPSRFSGSGSGTDFTLTISDLEPGDAATYYCQSTYLGTDYVGGAFGGGTKVEIK

SEQ ID NO: 3 - DNA, 657 bp, Artificial Sequence
  Synthesized
gacgtcgtgatgacccagtctccttccaccctgtctgcatctgtaggagacagagtcaccatcaattgccaagccagtgagagcattagcagttggttagcctggtatcagcagaaaccagggaaagcccctaagctcctgatctatgaagcatccaaactggcatctggggtcccatcaaggttcagcggcagtggatctgggacagaattcactctcaccatcagcagcctgcagcctgatgattttgcaacttattactgccaaggctatttttattttattagtcgtacttatgtaaattctttcggcggagggaccaaggtggagatcaaacgtacggtggctgcaccatctgtcttcatcttcccgccatctgatgagcagttgaaatctggaactgcctctgttgtgtgcctgctgaataacttctatcccagagaggccaaagtacagtggaaggtggataacgccctccaatcgggtaactcccaggagagtgtcacagagcaggacagcaaggacagcacctacagcctcagcagcaccctgacgctgagcaaagcagactacgagaaacacaaagtctacgcctgcgaagtcacccatcagggcctgagctcgcccgtcacaaagagcttcaacaggggagagtgt

SEQ ID NO: 4 - protein, 219 aa, Artificial Sequence
  Synthesized
DVVMTQSPSTLSASVGDRVTINCQASESISSWLAWYQQKPGKAPKLLIYEASKLASGVPSRFSGSGSGTEFTLTISSLQPDDFATYYCQGYFYFISRTYVNSFGGGTKVEIKRTVAAPSVFIFPPSDEQLKSGTASVVCLLNNFYPREAKVQWKVDNALQSGNSQESVTEQDSKDSTYSLSSTLTLSKADYEKHKVYACEVTHQGLSSPVTKSFNRGEC

SEQ ID NO: 5 - DNA, 3834 bp, Artificial Sequence
  Synthesized
tttcttaattcccttttcaaccaagaggttcagatccccttgactgaaagctattgcggcccttgtccgaaaaactggatatgttacaagaataattgttaccaattcttcgacgaaagcaagaactggtatgagagtcaggcgtcttgtatgagtcagaatgccagcctgcttaaggtttattcaaaagaagaccaggatctgcttaagttggtaaagagctaccactggatggggctggtacatatcccaacgaatgggtcatggcagtgggaggacggttctattctgagtccaaatctcctgacgatcatcgaaatgcagaaaggggactgtgccctgtatgcatcatccttcaaggggtacatcgagaactgcagtaccccaaatacctacatttgtatgcaaagaacggttggaggcggtggctcaggcggaggcggctcaggaggtggcggttcaggaggcggcggatctttcctaaactcattattcaaccaagaagttcaaattcccttgaccgaaagttactgtggcccatgtcctaaaaactggatatgttacaaaaataactgctaccaattttttgatgagagtaaaaactggtatgagagccaggcttcttgtatgtctcaaaatgccagccttctgaaagtatacagcaaagaggaccaggatttacttaaactggtgaagtcatatcattggatgggactagtacacattccaacaaatggatcttggcagtgggaagatggctccattctctcacccaacctactaacaataattgaaatgcagaagggagactgtgcactctatgcctcgagctttaaaggctatatagaaaactgttcaactccaaatacgtacatctgcatgcaaaggactgtggtcgacggcggtggagggtccggcggtggtggatcagaggtgcagctggtggagtctgggggaggcttggtccagcctggggggtccctgagactctcctgtgcagcctctggattcaccatcagtaccaatgcaatgagctgggtccgccaggctccagggaaggggctggagtggatcggagtcattactggtcgtgatatcacatactacgcgagctgggcgaaaggcagattcaccatctccagagacaattccaagaacacgctgtatcttcaaatgaacagcctgagagccgaggacacggctgtgtattactgtgcgagagacggtggttcttctgctattactagtaacaacatttggggccagggaaccctggtcaccgtgtcctcagctagcaccaagggcccatcggtcttccccctggcaccctcctccaagagcacctctgggggcacagcggccctgggctgcctggtcaaggactacttccccgaaccggtgacggtgtcgtggaactcaggcgccctgaccagcggcgtgcacaccttcccggctgtcctacagtcctcaggactctactccctcagcagcgtggtgaccgtgccctccagcagcttgggcacccagacctacatctgcaacgtgaatcacaagcccagcaacaccaaggtggacaagagagttgagcccaaatcttgtgacaaaactcacacatgcccaccgtgcccagcacctgaagccgcgggggcaccgtcagtcttcctcttccccccaaaacccaaggacaccctcatgatctcccggacccctgaggtcacatgcgtggtggtggacgtgagccacgaagaccctgaggtcaagttcaactggtacgtggacggcgtggaggtgcataatgccaagacaaagccgcgggaggagcagtacaacagcacgtaccgtgtggtcagcgtcctcaccgtcctgcaccaggactggctgaatggcaaggagtacaagtgcgcggtctccaacaaagccctcccagcccccatcgagaaaaccatctccaaagccaaagggcagccccgagaaccacaggtgtacaccctgcccccatcccgggatgagctgaccaagaaccaggtcagcctgacctgcctggtcaaaggcttctatcccagcgacatcgccgtggagtgggagagcaatgggcagccggagaacaactacaagaccacgcctcccgtgctggactccgacggctccttcttcctctatagcaagctcaccgtggacaagagcaggtggcagcaggggaacgtcttctcatgctccgtgatgcatgaggctctgcacaaccactacacgcagaagagcctctccctgtctccgggtggcggtggagggtccggcggtggtggatcccggtcgctggtggagtctgggggaggcttggtccagcctggggggtccctgagactctcctgtactgcctctggattcaccatcagtagctaccacatgcagtgggtccgccaggctccagggaaggggctggagtacatcggaaccattagtagtggtggtaatgtatactacgcgagctccgcgagaggcagattcaccatctccagaccctcgtccaagaacacggtggatcttcaaatgaacagcctgagagccgaggacacggctgtgtattactgtgcgagagactctggttatagtgatcctatgtggggccagggaaccctggtcaccgtctcttcaggcggtggcggtagtgggggaggcggttctggcggcggagggtccggcggtggaggatcagacgttgtgatgacccagtctccatcttccgtgtctgcatctgtaggagacagagtcaccatcacctgtcaggccagtcagaacattaggacttacttatcctggtatcagcagaaaccagggaaagcccctaagctcctgatctatgctgcagccaatctggcatctggggtcccatcaaggttcagcggcagtggatctgggacagatttcactctcaccatcagcgacctggagcctggcgatgctgcaacttactattgtcagtctacctatcttggtactgattatgttggcggtgctttcggcggagggaccaaggtggagatcaaaggcggtggagggtccggcggtggtggctccggagaggtgcagctgttggagtctgggggaggcttggtacagcctggggggtccctgagactctcctgtgcagcctctggattctccttcagtagcgggtacgacatgtgctgggtccgccaggctccagggaaggggctggagtggatcgcatgcattgctgctggtagtgctggtatcacttacgacgcgaactgggcgaaaggccggttcaccatctccagagacaattccaagaacacgctgtatctgcaaatgaacagcctgagagccgaggacacggccgtatattactgtgcgagatcggcgttttcgttcgactacgccatggacctctggggccagggaaccctggtcaccgtctcgagcggcggtggcggtagtgggggaggcggttctggcggcggagggtccggcggtggaggatcagacatccagatgacccagtctccttccaccctgtctgcatctgtaggagacagagtcaccatcacttgccaggccagtcagagcattagttcccacttaaactggtatcagcagaaaccagggaaagcccctaagctcctgatctataaggcatccactctggcatctggggtcccatcaaggttcagcggcagtggatctgggacagaatttactctcaccatcagcagcctgcagcctgatgattttgcaacttattactgccaacagggttatagttggggtaatgttgataatgttttcggcggagggaccaaggtggagatcaaa

SEQ ID NO: 6 - protein, 1278 aa, Artificial Sequence
  Synthesized
FLNSLFNQEVQIPLTESYCGPCPKNWICYKNNCYQFFDESKNWYESQASCMSQNASLLKVYSKEDQDLLKLVKSYHWMGLVHIPTNGSWQWEDGSILSPNLLTIIEMQKGDCALYASSFKGYIENCSTPNTYICMQRTVGGGGSGGGGSGGGGSGGGGSFLNSLFNQEVQIPLTESYCGPCPKNWICYKNNCYQFFDESKNWYESQASCMSQNASLLKVYSKEDQDLLKLVKSYHWMGLVHIPTNGSWQWEDGSILSPNLLTIIEMQKGDCALYASSFKGYIENCSTPNTYICMQRTVVDGGGGSGGGGSEVQLVESGGGLVQPGGSLRLSCAASGFTISTNAMSWVRQAPGKGLEWIGVITGRDITYYASWAKGRFTISRDNSKNTLYLQMNSLRAEDTAVYYCARDGGSSAITSNNIWGQGTLVTVSSASTKGPSVFPLAPSSKSTSGGTAALGCLVKDYFPEPVTVSWNSGALTSGVHTFPAVLQSSGLYSLSSVVTVPSSSLGTQTYICNVNHKPSNTKVDKRVEPKSCDKTHTCPPCPAPEAAGAPSVFLFPPKPKDTLMISRTPEVTCVVVDVSHEDPEVKFNWYVDGVEVHNAKTKPREEQYNSTYRVVSVLTVLHQDWLNGKEYKCAVSNKALPAPIEKTISKAKGQPREPQVYTLPPSRDELTKNQVSLTCLVKGFYPSDIAVEWESNGQPENNYKTTPPVLDSDGSFFLYSKLTVDKSRWQQGNVFSCSVMHEALHNHYTQKSLSLSPGGGGGSGGGGSRSLVESGGGLVQPGGSLRLSCTASGFTISSYHMQWVRQAPGKGLEYIGTISSGGNVYYASSARGRFTISRPSSKNTVDLQMNSLRAEDTAVYYCARDSGYSDPMWGQGTLVTVSSGGGGSGGGGSGGGGSGGGGSDVVMTQSPSSVSASVGDRVTITCQASQNIRTYLSWYQQKPGKAPKLLIYAAANLASGVPSRFSGSGSGTDFTLTISDLEPGDAATYYCQSTYLGTDYVGGAFGGGTKVEIKGGGGSGGGGSGEVQLLESGGGLVQPGGSLRLSCAASGFSFSSGYDMCWVRQAPGKGLEWIACIAAGSAGITYDANWAKGRFTISRDNSKNTLYLQMNSLRAEDTAVYYCARSAFSFDYAMDLWGQGTLVTVSSGGGGSGGGGSGGGGSGGGGSDIQMTQSPSTLSASVGDRVTITCQASQSISSHLNWYQQKPGKAPKLLIYKASTLASGVPSRFSGSGSGTEFTLTISSLQPDDFATYYCQQGYSWGNVDNVFGGGTKVEIK

SEQ ID NO: 7 - DNA, 657 bp, Artificial Sequence; identical to SEQ ID NO: 3
  Synthesized

SEQ ID NO: 8 - protein, 219 aa, Artificial Sequence; identical to SEQ ID NO: 4
  Synthesized

SEQ ID NO: 9 - DNA, 3837 bp, Artificial Sequence
  Synthesized
gacgttgtgatgacccagtctccatcttccgtgtctgcatctgtaggagacagagtcaccatcacctgtcaggccagtcagaacattaggacttacttatcctggtatcagcagaaaccagggaaagcccctaagctcctgatctatgctgcagccaatctggcatctggggtcccatcaaggttcagcggcagtggatctgggacagatttcactctcaccatcagcgacctggagcctggcgatgctgcaacttactattgtcagtctacctatcttggtactgattatgttggcggtgctttcggcggagggaccaaggtggagatcaaaggcggtggcggtagtgggggaggcggttctggcggcggagggtccggcggtggaggatcacggtcgctggtggagtctgggggaggcttggtccagcctggggggtccctgagactctcctgtacagcctctggattcaccatcagtagctaccacatgcagtgggtccgccaggctccagggaaggggctggagtacatcggaaccattagtagtggtggtaatgtatactacgcaagctccgctagaggcagattcaccatctccagaccctcgtccaagaacacggtggatcttcaaatgaacagcctgagagccgaggacacggctgtgtattactgtgcgagagactctggttatagtgatcctatgtggggccagggaaccctggtcaccgtgtcgacaggcggtggagggtccggcggtggtggatcagaggtgcagctgttggagtctgggggaggcttggtacagcctggggggtccctgagactctcctgtgcagcctctggattctccttcagtagcgggtacgacatgtgctgggtccgccaggctccagggaaggggctggagtggatcgcatgtattgctgctggtagtgctggtatcacttacgacgcgaactgggcgaaaggccggttcaccatctccagagacaattccaagaacacgctgtatctgcaaatgaacagcctgagagccgaggacacggccgtatattactgtgcgagatcggcgttttcgttcgactacgccatggacctctggggccagggaaccctggtcaccgtctcgagcgctagcaccaagggcccatcggtcttccccctggcaccctcctccaagagcacctctgggggcacagcggccctgggctgcctggtcaaggactacttccccgaaccggtgacggtgtcgtggaactcaggcgccctgaccagcggcgtgcacaccttcccggctgtcctacagtcctcaggactctactccctcagcagcgtggtgaccgtgccctccagcagcttgggcacccagacctacatctgcaacgtgaatcacaagcccagcaacaccaaggtggacaagagagttgagcccaaatcttgtgacaaaactcacacatgcccaccgtgcccagcacctgaagccgcgggggcaccgtcagtcttcctcttccccccaaaacccaaggacaccctcatgatctcccggacccctgaggtcacatgcgtggtggtggacgtgagccacgaagaccctgaggtcaagttcaactggtacgtggacggcgtggaggtgcataatgccaagacaaagccgcgggaggagcagtacaacagcacgtaccgtgtggtcagcgtcctcaccgtcctgcaccaggactggctgaatggcaaggagtacaagtgcgcggtctccaacaaagccctcccagcccccatcgagaaaaccatctccaaagccaaagggcagccccgagaaccacaggtgtacaccctgcccccatcccgggatgagctgaccaagaaccaggtcagcctgacctgcctggtcaaaggcttctatcccagcgacatcgccgtggagtgggagagcaatgggcagccggagaacaactacaagaccacgcctcccgtgctggactccgacggctccttcttcctctatagcaagctcaccgtggacaagagcaggtggcagcaggggaacgtcttctcatgctccgtgatgcatgaggctctgcacaaccactacacgcagaagagcctctccctgtctccgggtggcggtggagggtccggcggtggtggatccgaggtgcagctggtggagtctgggggaggcttggtccagcctggggggtccctgagactctcctgtgcagcctctggattcaccatcagtaccaatgcaatgagctgggtccgccaggctccagggaaggggctggagtggatcggagtcattactggtcgtgatatcacatactacgcgagctgggcgaaaggcagattcaccatctccagagacaattccaagaacacgctgtatcttcaaatgaacagcctgagagccgaggacacggctgtgtattactgtgcgagagacggtggttcttctgctattactagtaacaacatttggggccagggaaccctggtcaccgtctcttcaggcggtggcggtagtgggggaggcggttctggcggcggagggtccggcggtggaggatcagacgtcgtgatgacccagtctccttccaccctgtctgcatctgtaggagacagagtcaccatcaattgccaagccagtgagagcattagcagttggttagcctggtatcagcagaaaccagggaaagcccctaagctcctgatctatgaagcatccaaactggcatctggggtcccatcaaggttcagcggcagtggatctgggacagaatttactctcaccatcagcagcctgcagcctgatgattttgcaacttattactgccaaggctatttttattttattagtcgtacttatgtaaattctttcggcggagggaccaaggtggagatcaaaggcggtggagggtccggcggtggtggctccggatttcttaattcccttttcaaccaagaggttcagatccccttgactgaaagctattgcggcccttgtccgaaaaactggatatgttacaagaataattgttaccaattcttcgacgaaagcaagaactggtatgagagtcaggcgtcttgtatgagtcagaatgccagcctgcttaaggtttattcaaaagaagaccaggatctgcttaagttggtaaagagctaccactggatggggctggtacatatcccaacgaatgggtcatggcagtgggaggacggttctattctgagtccaaatctcctgacgatcatcgaaatgcagaaaggggactgtgccctgtatgcatcatccttcaaggggtacatcgagaactgcagtaccccaaatacctacatttgtatgcaaagaacggttggaggcggtggctcaggcggaggcggctcaggaggtggcggttcaggaggcggcggatctttcctaaactcattattcaaccaagaagttcaaattcccttgaccgaaagttactgtggcccatgtcctaaaaactggatatgttacaaaaataactgctaccaattttttgatgagagtaaaaactggtatgagagccaggcttcttgtatgtctcaaaatgccagccttctgaaagtatacagcaaagaggaccaggatttacttaaactggtgaagtcatatcattggatgggactagtacacattccaacaaatggatcttggcagtgggaagatggctccattctctcacccaacctactaacaataattgaaatgcagaagggagactgtgcactctatgcctcgagctttaaaggctatatagaaaactgttcaactccaaatacgtacatctgcatgcaaaggactgtgtaa

SEQ ID NO: 10 - protein, 1278 aa, Artificial Sequence
  Synthesized
DVVMTQSPSSVSASVGDRVTITCQASQNIRTYLSWYQQKPGKAPKLLIYAAANLASGVPSRFSGSGSGTDFTLTISDLEPGDAATYYCQSTYLGTDYVGGAFGGGTKVEIKGGGGSGGGGSGGGGSGGGGSRSLVESGGGLVQPGGSLRLSCTASGFTISSYHMQWVRQAPGKGLEYIGTISSGGNVYYASSARGRFTISRPSSKNTVDLQMNSLRAEDTAVYYCARDSGYSDPMWGQGTLVTVSTGGGGSGGGGSEVQLLESGGGLVQPGGSLRLSCAASGFSFSSGYDMCWVRQAPGKGLEWIACIAAGSAGITYDANWAKGRFTISRDNSKNTLYLQMNSLRAEDTAVYYCARSAFSFDYAMDLWGQGTLVTVSSASTKGPSVFPLAPSSKSTSGGTAALGCLVKDYFPEPVTVSWNSGALTSGVHTFPAVLQSSGLYSLSSVVTVPSSSLGTQTYICNVNHKPSNTKVDKRVEPKSCDKTHTCPPCPAPEAAGAPSVFLFPPKPKDTLMISRTPEVTCVVVDVSHEDPEVKFNWYVDGVEVHNAKTKPREEQYNSTYRVVSVLTVLHQDWLNGKEYKCAVSNKALPAPIEKTISKAKGQPREPQVYTLPPSRDELTKNQVSLTCLVKGFYPSDIAVEWESNGQPENNYKTTPPVLDSDGSFFLYSKLTVDKSRWQQGNVFSCSVMHEALHNHYTQKSLSLSPGGGGGSGGGGSEVQLVESGGGLVQPGGSLRLSCAASGFTISTNAMSWVRQAPGKGLEWIGVITGRDITYYASWAKGRFTISRDNSKNTLYLQMNSLRAEDTAVYYCARDGGSSAITSNNIWGQGTLVTVSSGGGGSGGGGSGGGGSGGGGSDVVMTQSPSTLSASVGDRVTINCQASESISSWLAWYQQKPGKAPKLLIYEASKLASGVPSRFSGSGSGTEFTLTISSLQPDDFATYYCQGYFYFISRTYVNSFGGGTKVEIKGGGGSGGGGSGFLNSLFNQEVQIPLTESYCGPCPKNWICYKNNCYQFFDESKNWYESQASCMSQNASLLKVYSKEDQDLLKLVKSYHWMGLVHIPTNGSWQWEDGSILSPNLLTIIEMQKGDCALYASSFKGYIENCSTPNTYICMQRTVGGGGSGGGGSGGGGSGGGGSFLNSLFNQEVQIPLTESYCGPCPKNWICYKNNCYQFFDESKNWYESQASCMSQNASLLKVYSKEDQDLLKLVKSYHWMGLVHIPTNGSWQWEDGSILSPNLLTIIEMQKGDCALYASSFKGYIENCSTPNTYICMQRTV

SEQ ID NO: 11 - DNA, 651 bp, Artificial Sequence
  Synthesized
gacatccagatgacccagtctccttccaccctgtctgcatctgtaggagacagagtcaccatcacttgccaggccagtcagagcattagttcccacttaaactggtatcagcagaaaccagggaaagcccctaagctcctgatctataaggcatccactctggcatctggggtcccatcaaggttcagcggcagtggatctgggacagaatttactctcaccatcagcagcctgcagcctgatgattttgcaacttattactgccaacagggttatagttggggtaatgttgataatgttttcggcggagggaccaaggtggagatcaaacgtacggtggctgcaccatctgtcttcatcttcccgccatctgatgagcagttgaaatctggaactgcctctgttgtgtgcctgctgaataacttctatcccagagaggccaaagtacagtggaaggtggataacgccctccaatcgggtaactcccaggagagtgtcacagagcaggacagcaaggacagcacctacagcctcagcagcaccctgacgctgagcaaagcagactacgagaaacacaaagtctacgcctgcgaagtcacccatcagggcctgagctcgcccgtcacaaagagcttcaacaggggagagtgt

SEQ ID NO: 12 - protein, 217 aa, Artificial Sequence
  Synthesized
DIQMTQSPSTLSASVGDRVTITCQASQSISSHLNWYQQKPGKAPKLLIYKASTLASGVPSRFSGSGSGTEFTLTISSLQPDDFATYYCQQGYSWGNVDNVFGGGTKVEIKRTVAAPSVFIFPPSDEQLKSGTASVVCLLNNFYPREAKVQWKVDNALQSGNSQESVTEQDSKDSTYSLSSTLTLSKADYEKHKVYACEVTHQGLSSPVTKSFNRGEC

SEQ ID NO: 13 - DNA, 3831 bp, Artificial Sequence
  Synthesized
gacatccagatgacccagtctccttccaccctgtctgcatctgtaggagacagagtcaccatcacttgccaggccagtcagagcattagttcccacttaaactggtatcagcagaaaccagggaaagcccctaagctcctgatctataaggcatccactctggcatctggggtcccatcaaggttcagcggcagtggatctgggacagaatttactctcaccatcagcagcctgcagcctgatgattttgcaacttattactgccaacagggttatagttggggtaatgttgataatgttttcggcggagggaccaaggtggagatcaaaggcggtggcggtagtgggggaggcggttctggcggcggagggtccggcggtggaggatcagaggtgcagctgttggagtctgggggaggcttggtacagcctggggggtccctgagactctcctgtgcagcctctggattctccttcagtagcgggtacgacatgtgctgggtccgccaggctccagggaaggggctggagtggatcgcatgtattgctgctggtagtgctggtatcacttacgacgcgaactgggcgaaaggccggttcaccatctccagagacaattccaagaacacgctgtatctgcaaatgaacagcctgagagccgaggacacggccgtatattactgtgcgagatcggcgttttcgttcgactacgccatggacctctggggccagggaaccctggtcaccgtgtcgacaggcggtggagggtccggcggtggtggatcacggtcgctggtggagtctgggggaggcttggtccagcctggggggtccctgagactctcctgtactgcctctggattcaccatcagtagctaccacatgcagtgggtccgccaggctccagggaaggggctggagtacatcggaaccattagtagtggtggtaatgtatactacgcaagctccgctagaggcagattcaccatctccagaccctcgtccaagaacacggtggatcttcaaatgaacagcctgagagccgaggacacggctgtgtattactgtgcgagagactctggttatagtgatcctatgtggggccagggaaccctggtcaccgtctcttcagctagcaccaagggcccatcggtcttccccctggcaccctcctccaagagcacctctgggggcacagcggccctgggctgcctggtcaaggactacttccccgaaccggtgacggtgtcgtggaactcaggcgccctgaccagcggcgtgcacaccttcccggctgtcctacagtcctcaggactctactccctcagcagcgtggtgaccgtgccctccagcagcttgggcacccagacctacatctgcaacgtgaatcacaagcccagcaacaccaaggtggacaagagagttgagcccaaatcttgtgacaaaactcacacatgcccaccgtgcccagcacctgaagccgcgggggcaccgtcagtcttcctcttccccccaaaacccaaggacaccctcatgatctcccggacccctgaggtcacatgcgtggtggtggacgtgagccacgaagaccctgaggtcaagttcaactggtacgtggacggcgtggaggtgcataatgccaagacaaagccgcgggaggagcagtacaacagcacgtaccgtgtggtcagcgtcctcaccgtcctgcaccaggactggctgaatggcaaggagtacaagtgcgcggtctccaacaaagccctcccagcccccatcgagaaaaccatctccaaagccaaagggcagccccgagaaccacaggtgtacaccctgcccccatcccgggatgagctgaccaagaaccaggtcagcctgacctgcctggtcaaaggcttctatcccagcgacatcgccgtggagtgggagagcaatgggcagccggagaacaactacaagaccacgcctcccgtgctggactccgacggctccttcttcctctatagcaagctcaccgtggacaagagcaggtggcagcaggggaacgtcttctcatgctccgtgatgcatgaggctctgcacaaccactacacgcagaagagcctctccctgtctccgggtggcggtggagggtccggcggtggtggatccgaggtgcagctggtggagtctgggggaggcttggtccagcctggggggtccctgagactctcctgtgcagcctctggattcaccatcagtaccaatgcaatgagctgggtccgccaggctccagggaaggggctggagtggatcggagtcattactggtcgtgatatcacatactacgcgagctgggcgaaaggcagattcaccatctccagagacaattccaagaacacgctgtatcttcaaatgaacagcctgagagccgaggacacggctgtgtattactgtgcgagagacggtggttcttctgctattactagtaacaacatttggggccagggaaccctggtcaccgtctcttcaggcggtggcggtagtgggggaggcggttctggcggcggagggtccggcggtggaggatcagacgtcgtgatgacccagtctccttccaccctgtctgcatctgtaggagacagagtcaccatcaattgccaagccagtgagagcattagcagttggttagcctggtatcagcagaaaccagggaaagcccctaagctcctgatctatgaagcatccaaactggcatctggggtcccatcaaggttcagcggcagtggatctgggacagaatttactctcaccatcagcagcctgcagcctgatgattttgcaacttattactgccaaggctatttttattttattagtcgtacttatgtaaattctttcggcggagggaccaaggtggagatcaaaggcggtggagggtccggcggtggtggctccggatttcttaattcccttttcaaccaagaggttcagatccccttgactgaaagctattgcggcccttgtccgaaaaactggatatgttacaagaataattgttaccaattcttcgacgaaagcaagaactggtatgagagtcaggcgtcttgtatgagtcagaatgccagcctgcttaaggtttattcaaaagaagaccaggatctgcttaagttggtaaagagctaccactggatggggctggtacatatcccaacgaatgggtcatggcagtgggaggacggttctattctgagtccaaatctcctgacgatcatcgaaatgcagaaaggggactgtgccctgtatgcatcatccttcaaggggtacatcgagaactgcagtaccccaaatacctacatttgtatgcaaagaacggttggaggcggtggctcaggcggaggcggctcaggaggtggcggttcaggaggcggcggatctttcctaaactcattattcaaccaagaagttcaaattcccttgaccgaaagttactgtggcccatgtcctaaaaactggatatgttacaaaaataactgctaccaattttttgatgagagtaaaaactggtatgagagccaggcttcttgtatgtctcaaaatgccagccttctgaaagtatacagcaaagaggaccaggatttacttaaactggtgaagtcatatcattggatgggactagtacacattccaacaaatggatcttggcagtgggaagatggctccattctctcacccaacctactaacaataattgaaatgcagaagggagactgtgcactctatgcctcgagctttaaaggctatatagaaaactgttcaactccaaatacgtacatctgcatgcaaaggactgtg

SEQ ID NO: 14 - protein, 1277 aa, Artificial Sequence
  Synthesized
DIQMTQSPSTLSASVGDRVTITCQASQSISSHLNWYQQKPGKAPKLLIYKASTLASGVPSRFSGSGSGTEFTLTISSLQPDDFATYYCQQGYSWGNVDNVFGGGTKVEIKGGGGSGGGGSGGGGSGGGGSEVQLLESGGGLVQPGGSLRLSCAASGFSFSSGYDMCWVRQAPGKGLEWIACIAAGSAGITYDANWAKGRFTISRDNSKNTLYLQMNSLRAEDTAVYYCARSAFSFDYAMDLWGQGTLVTVSTGGGGSGGGGSRSLVESGGGLVQPGGSLRLSCTASGFTISSYHMQWVRQAPGKGLEYIGTISSGGNVYYASSARGRFTISRPSSKNTVDLQMNSLRAEDTAVYYCARDSGYSDPMWGQGTLVTVSSASTKGPSVFPLAPSSKSTSGGTAALGCLVKDYFPEPVTVSWNSGALTSGVHTFPAVLQSSGLYSLSSVVTVPSSSLGTQTYICNVNHKPSNTKVDKRVEPKSCDKTHTCPPCPAPEAAGAPSVFLFPPKPKDTLMISRTPEVTCVVVDVSHEDPEVKFNWYVDGVEVHNAKTKPREEQYNSTYRVVSVLTVLHQDWLNGKEYKCAVSNKALPAPIEKTISKAKGQPREPQVYTLPPSRDELTKNQVSLTCLVKGFYPSDIAVEWESNGQPENNYKTTPPVLDSDGSFFLYSKLTVDKSRWQQGNVFSCSVMHEALHNHYTQKSLSLSPGGGGGSGGGGSEVQLVESGGGLVQPGGSLRLSCAASGFTISTNAMSWVRQAPGKGLEWIGVITGRDITYYASWAKGRFTISRDNSKNTLYLQMNSLRAEDTAVYYCARDGGSSAITSNNIWGQGTLVTVSSGGGGSGGGGSGGGGSGGGGSDVVMTQSPSTLSASVGDRVTINCQASESISSWLAWYQQKPGKAPKLLIYEASKLASGVPSRFSGSGSGTEFTLTISSLQPDDFATYYCQGYFYFISRTYVNSFGGGTKVEIKGGGGSGGGGSGFLNSLFNQEVQIPLTESYCGPCPKNWICYKNNCYQFFDESKNWYESQASCMSQNASLLKVYSKEDQDLLKLVKSYHWMGLVHIPTNGSWQWEDGSILSPNLLTIIEMQKGDCALYASSFKGYIENCSTPNTYICMQRTVGGGGSGGGGSGGGGSGGGGSFLNSLFNQEVQIPLTESYCGPCPKNWICYKNNCYQFFDESKNWYESQASCMSQNASLLKVYSKEDQDLLKLVKSYHWMGLVHIPTNGSWQWEDGSILSPNLLTIIEMQKGDCALYASSFKGYIENCSTPNTYICMQRTV

SEQ ID NO: 15 - DNA, 654 bp, Artificial Sequence
  Synthesized
gacgttgtgatgacccagtctccatcttccgtgtctgcatctgtaggagacagagtcaccatcacctgtcaggccagtcagaacattaggacttacttatcctggtatcagcagaaaccagggaaagcccctaagctcctgatctatgctgcagccaatctggcatctggggtcccatcaaggttcagcggcagtggatctgggacagatttcactctcaccatcagcgacctggagcctggcgatgctgcaacttactattgtcagtctacctatcttggtactgattatgttggcggtgctttcggcggagggaccaaggtggagatcaaacgtacggtggctgcaccatctgtcttcatcttcccgccatctgatgagcagttgaaatctggaactgcctctgttgtgtgcctgctgaataacttctatcccagagaggccaaagtacagtggaaggtggataacgccctccaatcgggtaactcccaggagagtgtcacagagcaggacagcaaggacagcacctacagcctcagcagcaccctgacgctgagcaaagcagactacgagaaacacaaagtctacgcctgcgaagtcacccatcagggcctgagctcgcccgtcacaaagagcttcaacaggggagagtgt

SEQ ID NO: 16 - protein, 218 aa, Artificial Sequence
  Synthesized
DVVMTQSPSSVSASVGDRVTITCQASQNIRTYLSWYQQKPGKAPKLLIYAAANLASGVPSRFSGSGSGTDFTLTISDLEPGDAATYYCQSTYLGTDYVGGAFGGGTKVEIKRTVAAPSVFIFPPSDEQLKSGTASVVCLLNNFYPREAKVQWKVDNALQSGNSQESVTEQDSKDSTYSLSSTLTLSKADYEKHKVYACEVTHQGLSSPVTKSFNRGEC

SEQ ID NO: 17 - DNA, 4782 bp, Artificial Sequence
  Synthesized
tttcttaattcccttttcaaccaagaggttcagatccccttgactgaaagctattgcggcccttgtccgaaaaactggatatgttacaagaataattgttaccaattcttcgacgaaagcaagaactggtatgagagtcaggcgtcttgtatgagtcagaatgccagcctgcttaaggtttattcaaaagaagaccaggatctgcttaagttggtaaagagctaccactggatggggctggtacatatcccaacgaatgggtcatggcagtgggaggacggttctattctgagtccaaatctcctgacgatcatcgaaatgcagaaaggggactgtgccctgtatgcatcatccttcaaggggtacatcgagaactgcagtaccccaaatacctacatttgtatgcaaagaacggttggaggcggtggctcaggcggaggcggctcaggaggtggcggttcaggaggcggcggatctttcctaaactcattattcaaccaagaagttcaaattcccttgaccgaaagttactgtggcccatgtcctaaaaactggatatgttacaaaaataactgctaccaattttttgatgagagtaaaaactggtatgagagccaggcttcttgtatgtctcaaaatgccagccttctgaaagtatacagcaaagaggaccaggatttacttaaactggtgaagtcatatcattggatgggactagtacacattccaacaaatggatcttggcagtgggaagatggctccattctctcacccaacctactaacaataattgaaatgcagaagggagactgtgcactctatgcctcgagctttaaaggctatatagaaaactgttcaactccaaatacgtacatctgcatgcaaaggactgtggtcgacggcggtggagggtccggcggtggtggatcagaggtgcagctggtggagtctgggggaggcttggtccagcctggggggtccctgagactctcctgtgcagcctctggattcaccatcagtaccaatgcaatgagctgggtccgccaggctccagggaaggggctggagtggatcggagtcattactggtcgtgatatcacatactacgcgagctgggcgaaaggcagattcaccatctccagagacaattccaagaacacgctgtatcttcaaatgaacagcctgagagccgaggacacggctgtgtattactgtgcgagagacggtggttcttctgctattactagtaacaacatttggggccagggaaccctggtcaccgtgtcctcagctagcaccaagggcccatcggtcttccccctggcaccctcctccaagagcacctctgggggcacagcggccctgggctgcctggtcaaggactacttccccgaaccggtgacggtgtcgtggaactcaggcgccctgaccagcggcgtgcacaccttcccggctgtcctacagtcctcaggactctactccctcagcagcgtggtgaccgtgccctccagcagcttgggcacccagacctacatctgcaacgtgaatcacaagcccagcaacaccaaggtggacaagagagttgagcccaaatcttgtgacaaaactcacacatgcccaccgtgcccagcacctgaagccgcgggggcaccgtcagtcttcctcttccccccaaaacccaaggacaccctcatgatctcccggacccctgaggtcacatgcgtggtggtggacgtgagccacgaagaccctgaggtcaagttcaactggtacgtggacggcgtggaggtgcataatgccaagacaaagccgcgggaggagcagtacaacagcacgtaccgtgtggtcagcgtcctcaccgtcctgcaccaggactggctgaatggcaaggagtacaagtgcgcggtctccaacaaagccctcccagcccccatcgagaaaaccatctccaaagccaaagggcagccccgagaaccacaggtgtacaccctgcccccatcccgggatgagctgaccaagaaccaggtcagcctgacctgcctggtcaaaggcttctatcccagcgacatcgccgtggagtgggagagcaatgggcagccggagaacaactacaagaccacgcctcccgtgctggactccgacggctccttcttcctctatagcaagctcaccgtggacaagagcaggtggcagcaggggaacgtcttctcatgctccgtgatgcatgaggctctgcacaaccactacacgcagaagagcctctccctgtctccgggtggcggtggagggtccggcggtggtggatccgaggtgcagctgttggagtctgggggaggcttggtacagcctggggggtccctgagactctcctgtgcagcctctggattctccttcagtagcgggtacgacatgtgctgggtccgccaggctccagggaaggggctggagtggatcgcatgcattgctgctggtagtgctggtatcacttacgacgcgaactgggcgaaaggccggttcaccatctccagagacaattccaagaacacgctgtatctgcaaatgaacagcctgagagccgaggacacggccgtatattactgtgcgagatcggcgttttcgttcgactacgccatggacctctggggccagggaaccctggtcaccgtctcgagcggtggaggcggatctggcggaggtggttccggcggtggcggctccggtggaggcggctctgacatccagatgacccagtctccttccaccctgtctgcatctgtaggagacagagtcaccatcacttgccaggccagtcagagcattagttcccacttaaactggtatcagcagaaaccagggaaagcccctaagctcctgatctataaggcatccactctggcatctggggtcccatcaaggttcagcggcagtggatctgggacagaatttactctcaccatcagcagcctgcagcctgatgattttgcaacttattactgccaacagggttatagttggggtaatgttgataatgttttcggcggagggaccaaggtggagatcaaaggcggtggagggtccggcggtggtggctccggacgagagggccccgagctgtctcctgatgacccagcaggcctcttggacttgcggcagggtatgttcgctcaacttgtggctcagaatgttctgctcattgatggaccactctcttggtatagtgaccccggtctggccggggtgagtctgaccggcgggctctcttataaagaggatactaaggaactggtcgtagcaaaagcgggcgtttattacgttttttttcagctggagctcaggcgcgtggtggccggcgagggcagtggctctgtgtccctggccctgcacttacagcccttgagaagcgctgcaggtgctgccgcactggctttaactgttgacctccctccggcctcttctgaagctagaaacagcgctttcggcttccaagggcgcctgctgcacctgagcgcaggccagcgcttaggtgtgcaccttcatacagaggccagggcccgacacgcttggcagctcacacagggtgccacggttctcggacttttccgcgttactcccgagatccccgctggcctcggaagtactggttctgggtctaaacccggttccggcgaaggtagtactaaaggacgagaagggccagagttaagtccagatgaccctgctgggcttttggacctgcggcagggcatgttcgctcaactggtggctcagaacgtgctgctgatcgatggccccctgagttggtacagcgatcccgggctggcaggcgtgtcacttacagggggcctctcttacaaggaagacaccaaggagttagtggtcgctaaggctggcgtgtattacgtgttcttccaactggagctgagaagggttgtggcaggagagggtagcggcagcgtgtctttagcccttcacttgcagcccctgaggtctgctgcaggtgcagccgctctcgcgctcaccgtggatctccccccagcctcatctgaagctaggaacagtgcatttggctttcagggacgcttgctgcacctctccgctggacagaggctgggcgtgcaccttcacacagaggcccgtgccaggcatgcatggcagctcactcagggggcaacagtgctgggtctcttccgcgtgactcctgaaataccagctggacttggcggtggaggcagcggcggaggaggatctcgtgaggggccagaactgtcccccgatgacccagccggactgctcgatctcagacagggcatgttcgctcagcttgtagcccaaaatgtcctcctgattgacggccctttgagctggtatagtgatcccggcttggccggggtatctctgaccggaggcctctcctacaaggaagacaccaaagagctggtggtggcaaaagcgggggtgtattatgtgttctttcagctcgagctgcggagagttgtggccggggaagggtctgggagcgtatctcttgcacttcacctgcagcccctgcgcagcgccgctggagccgccgcccttgctcttactgtggatctgcctcctgcttcctcagaagcacgcaacagcgccttcggctttcaaggacgtctcctgcacttgtccgcaggacagaggttgggcgtccatttacacactgaggcacgggcacggcacgcttggcagcttacccagggagccaccgtgctgggactctttagagtgacacccgagatccccgctggcttg

SEQ ID NO: 18 - protein, 1594 aa, Artificial Sequence
  Synthesized
FLNSLFNQEVQIPLTESYCGPCPKNWICYKNNCYQFFDESKNWYESQASCMSQNASLLKVYSKEDQDLLKLVKSYHWMGLVHIPTNGSWQWEDGSILSPNLLTIIEMQKGDCALYASSFKGYIENCSTPNTYICMQRTVGGGGSGGGGSGGGGSGGGGSFLNSLFNQEVQIPLTESYCGPCPKNWICYKNNCYQFFDESKNWYESQASCMSQNASLLKVYSKEDQDLLKLVKSYHWMGLVHIPTNGSWQWEDGSILSPNLLTIIEMQKGDCALYASSFKGYIENCSTPNTYICMQRTVVDGGGGSGGGGSEVQLVESGGGLVQPGGSLRLSCAASGFTISTNAMSWVRQAPGKGLEWIGVITGRDITYYASWAKGRFTISRDNSKNTLYLQMNSLRAEDTAVYYCARDGGSSAITSNNIWGQGTLVTVSSASTKGPSVFPLAPSSKSTSGGTAALGCLVKDYFPEPVTVSWNSGALTSGVHTFPAVLQSSGLYSLSSVVTVPSSSLGTQTYICNVNHKPSNTKVDKRVEPKSCDKTHTCPPCPAPEAAGAPSVFLFPPKPKDTLMISRTPEVTCVVVDVSHEDPEVKFNWYVDGVEVHNAKTKPREEQYNSTYRVVSVLTVLHQDWLNGKEYKCAVSNKALPAPIEKTISKAKGQPREPQVYTLPPSRDELTKNQVSLTCLVKGFYPSDIAVEWESNGQPENNYKTTPPVLDSDGSFFLYSKLTVDKSRWQQGNVFSCSVMHEALHNHYTQKSLSLSPGGGGGSGGGGSEVQLLESGGGLVQPGGSLRLSCAASGFSFSSGYDMCWVRQAPGKGLEWIACIAAGSAGITYDANWAKGRFTISRDNSKNTLYLQMNSLRAEDTAVYYCARSAFSFDYAMDLWGQGTLVTVSSGGGGSGGGGSGGGGSGGGGSDIQMTQSPSTLSASVGDRVTITCQASQSISSHLNWYQQKPGKAPKLLIYKASTLASGVPSRFSGSGSGTEFTLTISSLQPDDFATYYCQQGYSWGNVDNVFGGGTKVEIKGGGGSGGGGSGREGPELSPDDPAGLLDLRQGMFAQLVAQNVLLIDGPLSWYSDPGLAGVSLTGGLSYKEDTKELVVAKAGVYYVFFQLELRRVVAGEGSGSVSLALHLQPLRSAAGAAALALTVDLPPASSEARNSAFGFQGRLLHLSAGQRLGVHLHTEARARHAWQLTQGATVLGLFRVTPEIPAGLGSTGSGSKPGSGEGSTKGREGPELSPDDPAGLLDLRQGMFAQLVAQNVLLIDGPLSWYSDPGLAGVSLTGGLSYKEDTKELVVAKAGVYYVFFQLELRRVVAGEGSGSVSLALHLQPLRSAAGAAALALTVDLPPASSEARNSAFGFQGRLLHLSAGQRLGVHLHTEARARHAWQLTQGATVLGLFRVTPEIPAGLGGGGSGGGGSREGPELSPDDPAGLLDLRQGMFAQLVAQNVLLIDGPLSWYSDPGLAGVSLTGGLSYKEDTKELVVAKAGVYYVFFQLELRRVVAGEGSGSVSLALHLQPLRSAAGAAALALTVDLPPASSEARNSAFGFQGRLLHLSAGQRLGVHLHTEARARHAWQLTQGATVLGLFRVTPEIPAGL

SEQ ID NO: 19 - DNA, 657 bp, Artificial Sequence; identical to SEQ ID NO: 3
  Synthesized

SEQ ID NO: 20 - protein, 219 aa, Artificial Sequence; identical to SEQ ID NO: 4
  Synthesized

SEQ ID NO: 21 - DNA, 4782 bp, Artificial Sequence
  Synthesized
tttcttaattcccttttcaaccaagaggttcagatccccttgactgaaagctattgcggcccttgtccgaaaaactggatatgttacaagaataattgttaccaattcttcgacgaaagcaagaactggtatgagagtcaggcgtcttgtatgagtcagaatgccagcctgcttaaggtttattcaaaagaagaccaggatctgcttaagttggtaaagagctaccactggatggggctggtacatatcccaacgaatgggtcatggcagtgggaggacggttctattctgagtccaaatctcctgacgatcatcgaaatgcagaaaggggactgtgccctgtatgcatcatccttcaaggggtacatcgagaactgcagtaccccaaatacctacatttgtatgcaaagaacggttggaggcggtggctcaggcggaggcggctcaggaggtggcggttcaggaggcggcggatctttcctaaactcattattcaaccaagaagttcaaattcccttgaccgaaagttactgtggcccatgtcctaaaaactggatatgttacaaaaataactgctaccaattttttgatgagagtaaaaactggtatgagagccaggcttcttgtatgtctcaaaatgccagccttctgaaagtatacagcaaagaggaccaggatttacttaaactggtgaagtcatatcattggatgggactagtacacattccaacaaatggatcttggcagtgggaagatggctccattctctcacccaacctactaacaataattgaaatgcagaagggagactgtgcactctatgcctcgagctttaaaggctatatagaaaactgttcaactccaaatacgtacatctgcatgcaaaggactgtggtcgacggcggtggagggtccggcggtggtggatcagaggtgcagctggtggagtctgggggaggcttggtccagcctggggggtccctgagactctcctgtgcagcctctggattcaccatcagtaccaatgcaatgagctgggtccgccaggctccagggaaggggctggagtggatcggagtcattactggtcgtgatatcacatactacgcgagctgggcgaaaggcagattcaccatctccagagacaattccaagaacacgctgtatcttcaaatgaacagcctgagagccgaggacacggctgtgtattactgtgcgagagacggtggttcttctgctattactagtaacaacatttggggccagggaaccctggtcaccgtgtcctcagctagcaccaagggcccatcggtcttccccctggcaccctcctccaagagcacctctgggggcacagcggccctgggctgcctggtcaaggactacttccccgaaccggtgacggtgtcgtggaactcaggcgccctgaccagcggcgtgcacaccttcccggctgtcctacagtcctcaggactctactccctcagcagcgtggtgaccgtgccctccagcagcttgggcacccagacctacatctgcaacgtgaatcacaagcccagcaacaccaaggtggacaagagagttgagcccaaatcttgtgacaaaactcacacatgcccaccgtgcccagcacctgaagccgcgggggcaccgtcagtcttcctcttccccccaaaacccaaggacaccctcatgatctcccggacccctgaggtcacatgcgtggtggtggacgtgagccacgaagaccctgaggtcaagttcaactggtacgtggacggcgtggaggtgcataatgccaagacaaagccgcgggaggagcagtacaacagcacgtaccgtgtggtcagcgtcctcaccgtcctgcaccaggactggctgaatggcaaggagtacaagtgcgcggtctccaacaaagccctcccagcccccatcgagaaaaccatctccaaagccaaagggcagccccgagaaccacaggtgtacaccctgcccccatcccgggatgagctgaccaagaaccaggtcagcctgacctgcctggtcaaaggcttctatcccagcgacatcgccgtggagtgggagagcaatgggcagccggagaacaactacaagaccacgcctcccgtgctggactccgacggctccttcttcctctatagcaagctcaccgtggacaagagcaggtggcagcaggggaacgtcttctcatgctccgtgatgcatgaggctctgcacaaccactacacgcagaagagcctctccctgtctccgggtggcggtggagggtccggcggtggtggatcccgagagggccccgagctgtctcctgatgacccagcaggcctcttggacttgcggcagggtatgttcgctcaacttgtggctcagaatgttctgctcattgatggaccactctcttggtatagtgaccccggtctggccggggtgagtctgaccggcgggctctcttataaagaggatactaaggaactggtcgtagcaaaagcgggcgtttattacgttttttttcagctggagctcaggcgcgtggtggccggcgagggcagtggctctgtgtccctggccctgcacttacagcccttgagaagcgctgcaggtgctgccgcactggctttaactgttgacctccctccggcctcttctgaagctagaaacagcgctttcggcttccaagggcgcctgctgcacctgagcgcaggccagcgcttaggtgtgcaccttcatacagaggccagggcccgacacgcttggcagctcacacagggtgccacggttctcggacttttccgcgttactcccgagatccccgctggcctcggaagtactggttctgggtctaaacccggttccggcgaaggtagtactaaaggacgagaagggccagagttaagtccagatgaccctgctgggcttttggacctgcggcagggcatgttcgctcaactggtggctcagaacgtgctgctgatcgatggccccctgagttggtacagcgatcccgggctggcaggcgtgtcacttacagggggcctctcttacaaggaagacaccaaggagttagtggtcgctaaggctggcgtgtattacgtgttcttccaactggagctgagaagggttgtggcaggagagggtagcggcagcgtgtctttagcccttcacttgcagcccctgaggtctgctgcaggtgcagccgctctcgcgctcaccgtggatctccccccagcctcatctgaagctaggaacagtgcatttggctttcagggacgcttgctgcacctctccgctggacagaggctgggcgtgcaccttcacacagaggcccgtgccaggcatgcatggcagctcactcagggggcaacagtgctgggtctcttccgcgtgactcctgaaataccagctggacttggcggtggaggcagcggcggaggaggatctcgtgaggggccagaactgtcccccgatgacccagccggactgctcgatctcagacagggcatgttcgctcagcttgtagcccaaaatgtcctcctgattgacggccctttgagctggtatagtgatcccggcttggccggggtatctctgaccggaggcctctcctacaaggaagacaccaaagagctggtggtggcaaaagcgggggtgtattatgtgttctttcagctcgagctgcggagagttgtggccggggaagggtctgggagcgtatctcttgcacttcacctgcagcccctgcgcagcgccgctggagccgccgcccttgctcttactgtggatctgcctcctgcttcctcagaagcacgcaacagcgccttcggctttcaaggacgtctcctgcacttgtccgcaggacagaggttgggcgtccatttacacactgaggcacgggcacggcacgcttggcagcttacccagggagccaccgtgctgggactctttagagtgacacccgagatccccgctggcttgggcggtggagggtccggcggtggtggctccggagaggtgcagctgttggagtctgggggaggcttggtacagcctggggggtccctgagactctcctgtgcagcctctggattctccttcagtagcgggtacgacatgtgctgggtccgccaggctccagggaaggggctggagtggatcgcatgcattgctgctggtagtgctggtatcacttacgacgcgaactgggcgaaaggccggttcaccatctccagagacaattccaagaacacgctgtatctgcaaatgaacagcctgagagccgaggacacggccgtatattactgtgcgagatcggcgttttcgttcgactacgccatggacctctggggccagggaaccctggtcaccgtctcgagcggcggtggcggtagtgggggaggcggttctggcggcggagggtccggcggtggaggatcagacatccagatgacccagtctccttccaccctgtctgcatctgtaggagacagagtcaccatcacttgccaggccagtcagagcattagttcccacttaaactggtatcagcagaaaccagggaaagcccctaagctcctgatctataaggcatccactctggcatctggggtcccatcaaggttcagcggcagtggatctgggacagaatttactctcaccatcagcagcctgcagcctgatgattttgcaacttattactgccaacagggttatagttggggtaatgttgataatgttttcggcggagggaccaaggtggagatcaaa

SEQ ID NO: 22 - protein, 1594 aa, Artificial Sequence
  Synthesized
FLNSLFNQEVQIPLTESYCGPCPKNWICYKNNCYQFFDESKNWYESQASCMSQNASLLKVYSKEDQDLLKLVKSYHWMGLVHIPTNGSWQWEDGSILSPNLLTIIEMQKGDCALYASSFKGYIENCSTPNTYICMQRTVGGGGSGGGGSGGGGSGGGGSFLNSLFNQEVQIPLTESYCGPCPKNWICYKNNCYQFFDESKNWYESQASCMSQNASLLKVYSKEDQDLLKLVKSYHWMGLVHIPTNGSWQWEDGSILSPNLLTIIEMQKGDCALYASSFKGYIENCSTPNTYICMQRTVVDGGGGSGGGGSEVQLVESGGGLVQPGGSLRLSCAASGFTISTNAMSWVRQAPGKGLEWIGVITGRDITYYASWAKGRFTISRDNSKNTLYLQMNSLRAEDTAVYYCARDGGSSAITSNNIWGQGTLVTVSSASTKGPSVFPLAPSSKSTSGGTAALGCLVKDYFPEPVTVSWNSGALTSGVHTFPAVLQSSGLYSLSSVVTVPSSSLGTQTYICNVNHKPSNTKVDKRVEPKSCDKTHTCPPCPAPEAAGAPSVFLFPPKPKDTLMISRTPEVTCVVVDVSHEDPEVKFNWYVDGVEVHNAKTKPREEQYNSTYRVVSVLTVLHQDWLNGKEYKCAVSNKALPAPIEKTISKAKGQPREPQVYTLPPSRDELTKNQVSLTCLVKGFYPSDIAVEWESNGQPENNYKTTPPVLDSDGSFFLYSKLTVDKSRWQQGNVFSCSVMHEALHNHYTQKSLSLSPGGGGGSGGGGSREGPELSPDDPAGLLDLRQGMFAQLVAQNVLLIDGPLSWYSDPGLAGVSLTGGLSYKEDTKELVVAKAGVYYVFFQLELRRVVAGEGSGSVSLALHLQPLRSAAGAAALALTVDLPPASSEARNSAFGFQGRLLHLSAGQRLGVHLHTEARARHAWQLTQGATVLGLFRVTPEIPAGLGSTGSGSKPGSGEGSTKGREGPELSPDDPAGLLDLRQGMFAQLVAQNVLLIDGPLSWYSDPGLAGVSLTGGLSYKEDTKELVVAKAGVYYVFFQLELRRVVAGEGSGSVSLALHLQPLRSAAGAAALALTVDLPPASSEARNSAFGFQGRLLHLSAGQRLGVHLHTEARARHAWQLTQGATVLGLFRVTPEIPAGLGGGGSGGGGSREGPELSPDDPAGLLDLRQGMFAQLVAQNVLLIDGPLSWYSDPGLAGVSLTGGLSYKEDTKELVVAKAGVYYVFFQLELRRVVAGEGSGSVSLALHLQPLRSAAGAAALALTVDLPPASSEARNSAFGFQGRLLHLSAGQRLGVHLHTEARARHAWQLTQGATVLGLFRVTPEIPAGLGGGGSGGGGSGEVQLLESGGGLVQPGGSLRLSCAASGFSFSSGYDMCWVRQAPGKGLEWIACIAAGSAGITYDANWAKGRFTISRDNSKNTLYLQMNSLRAEDTAVYYCARSAFSFDYAMDLWGQGTLVTVSSGGGGSGGGGSGGGGSGGGGSDIQMTQSPSTLSASVGDRVTITCQASQSISSHLNWYQQKPGKAPKLLIYKASTLASGVPSRFSGSGSGTEFTLTISSLQPDDFATYYCQQGYSWGNVDNVFGGGTKVEIK

SEQ ID NO: 23 - DNA, 657 bp, Artificial Sequence; identical to SEQ ID NO: 3
  Synthesized

SEQ ID NO: 24 - protein, 219 aa, Artificial Sequence; identical to SEQ ID NO: 4
  Synthesized

SEQ ID NO: 25 - DNA, 4788 bp, Artificial Sequence
  Synthesized
cgagagggccccgagctgtctcctgatgacccagcaggcctcttggacttgcggcagggtatgttcgctcaacttgtggctcagaatgttctgctcattgatggaccactctcttggtatagtgaccccggtctggccggggtgagtctgaccggcgggctctcttataaagaggatactaaggaactggtcgtagcaaaagcgggcgtttattacgttttttttcagctggagctcaggcgcgtggtggccggcgagggcagtggctctgtgtccctggccctgcacttacagcccttgagaagcgctgcaggtgctgccgcactggctttaactgttgacctccctccggcctcttctgaagctagaaacagcgctttcggcttccaagggcgcctgctgcacctgagcgcaggccagcgcttaggtgtgcaccttcatacagaggccagggcccgacacgcttggcagctcacacagggtgccacggttctcggacttttccgcgttactcccgagatccccgctggcctcggaagtactggttctgggtctaaacccggttccggcgaaggtagtactaaaggacgagaagggccagagttaagtccagatgaccctgctgggcttttggacctgcggcagggcatgttcgctcaactggtggctcagaacgtgctgctgatcgatggccccctgagttggtacagcgatcccgggctggcaggcgtgtcacttacagggggcctctcttacaaggaagacaccaaggagttagtggtcgctaaggctggcgtgtattacgtgttcttccaactggagctgagaagggttgtggcaggagagggtagcggcagcgtgtctttagcccttcacttgcagcccctgaggtctgctgcaggtgcagccgctctcgcgctcaccgtggatctccccccagcctcatctgaagctaggaacagtgcatttggctttcagggacgcttgctgcacctctccgctggacagaggctgggcgtgcaccttcacacagaggcccgtgccaggcatgcatggcagctcactcagggggcaacagtgctgggtctcttccgcgtgactcctgaaataccagctggacttggcggtggaggcagcggcggaggaggatctcgtgaggggccagaactgtcccccgatgacccagccggactgctcgatctcagacagggcatgttcgctcagcttgtagcccaaaatgtcctcctgattgacggccctttgagctggtatagtgatcccggcttggccggggtatctctgaccggaggcctctcctacaaggaagacaccaaagagctggtggtggcaaaagcgggggtgtattatgtgttctttcagctcgagctgcggagagttgtggccggggaagggtctgggagcgtatctcttgcacttcacctgcagcccctgcgcagcgccgctggagccgccgcccttgctcttactgtggatctgcctcctgcttcctcagaagcacgcaacagcgccttcggctttcaaggacgtctcctgcacttgtccgcaggacagaggttgggcgtccatttacacactgaggcacgggcacggcacgcttggcagcttacccagggagccaccgtgctgggactctttagagtgacacccgagatccccgctggcttgtcgacaggcggtggagggtccggcggtggtggatcagaggtgcagctgttggagtctgggggaggcttggtacagcctggggggtccctgagactctcctgtgcagcctctggattctccttcagtagcgggtacgacatgtgctgggtccgccaggctccagggaaggggctggagtggatcgcatgtattgctgctggtagtgctggtatcacttacgacgcgaactgggcgaaaggccggttcaccatctccagagacaattccaagaacacgctgtatctgcaaatgaacagcctgagagccgaggacacggccgtatattactgtgcgagatcggcgttttcgttcgactacgccatggacctctggggccagggaaccctggtcaccgtctcgagcgctagcaccaagggcccatcggtcttccccctggcaccctcctccaagagcacctctgggggcacagcggccctgggctgcctggtcaaggactacttccccgaaccggtgacggtgtcgtggaactcaggcgccctgaccagcggcgtgcacaccttcccggctgtcctacagtcctcaggactctactccctcagcagcgtggtgaccgtgccctccagcagcttgggcacccagacctacatctgcaacgtgaatcacaagcccagcaacaccaaggtggacaagagagttgagcccaaatcttgtgacaaaactcacacatgcccaccgtgcccagcacctgaagccgcgggggcaccgtcagtcttcctcttccccccaaaacccaaggacaccctcatgatctcccggacccctgaggtcacatgcgtggtggtggacgtgagccacgaagaccctgaggtcaagttcaactggtacgtggacggcgtggaggtgcataatgccaagacaaagccgcgggaggagcagtacaacagcacgtaccgtgtggtcagcgtcctcaccgtcctgcaccaggactggctgaatggcaaggagtacaagtgcgcggtctccaacaaagccctcccagcccccatcgagaaaaccatctccaaagccaaagggcagccccgagaaccacaggtgtacaccctgcccccatcccgggatgagctgaccaagaaccaggtcagcctgacctgcctggtcaaaggcttctatcccagcgacatcgccgtggagtgggagagcaatgggcagccggagaacaactacaagaccacgcctcccgtgctggactccgacggctccttcttcctctatagcaagctcaccgtggacaagagcaggtggcagcaggggaacgtcttctcatgctccgtgatgcatgaggctctgcacaaccactacacgcagaagagcctctccctgtctccgggtggcggtggagggtccggcggtggtggatccgaggtgcagctggtggagtctgggggaggcttggtccagcctggggggtccctgagactctcctgtgcagcctctggattcaccatcagtaccaatgcaatgagctgggtccgccaggctccagggaaggggctggagtggatcggagtcattactggtcgtgatatcacatactacgcgagctgggcgaaaggcagattcaccatctccagagacaattccaagaacacgctgtatcttcaaatgaacagcctgagagccgaggacacggctgtgtattactgtgcgagagacggtggttcttctgctattactagtaacaacatttggggccagggaaccctggtcaccgtctcttcaggcggtggcggtagtgggggaggcggttctggcggcggagggtccggcggtggaggatcagacgtcgtgatgacccagtctccttccaccctgtctgcatctgtaggagacagagtcaccatcaattgccaagccagtgagagcattagcagttggttagcctggtatcagcagaaaccagggaaagcccctaagctcctgatctatgaagcatccaaactggcatctggggtcccatcaaggttcagcggcagtggatctgggacagaatttactctcaccatcagcagcctgcagcctgatgattttgcaacttattactgccaaggctatttttattttattagtcgtacttatgtaaattctttcggcggagggaccaaggtggagatcaaaggcggtggagggtccggcggtggtggctccggatttcttaattcccttttcaaccaagaggttcagatccccttgactgaaagctattgcggcccttgtccgaaaaactggatatgttacaagaataattgttaccaattcttcgacgaaagcaagaactggtatgagagtcaggcgtcttgtatgagtcagaatgccagcctgcttaaggtttattcaaaagaagaccaggatctgcttaagttggtaaagagctaccactggatggggctggtacatatcccaacgaatgggtcatggcagtgggaggacggttctattctgagtccaaatctcctgacgatcatcgaaatgcagaaaggggactgtgccctgtatgcatcatccttcaaggggtacatcgagaactgcagtaccccaaatacctacatttgtatgcaaagaacggttggaggcggtggctcaggcggaggcggctcaggaggtggcggttcaggaggcggcggatctttcctaaactcattattcaaccaagaagttcaaattcccttgaccgaaagttactgtggcccatgtcctaaaaactggatatgttacaaaaataactgctaccaattttttgatgagagtaaaaactggtatgagagccaggcttcttgtatgtctcaaaatgccagccttctgaaagtatacagcaaagaggaccaggatttacttaaactggtgaagtcatatcattggatgggactagtacacattccaacaaatggatcttggcagtgggaagatggctccattctctcacccaacctactaacaataattgaaatgcagaagggagactgtgcactctatgcctcgagctttaaaggctatatagaaaactgttcaactccaaatacgtacatctgcatgcaaaggactgtg

SEQ ID NO: 26 - protein, 1596 aa, Artificial Sequence
  Synthesized
REGPELSPDDPAGLLDLRQGMFAQLVAQNVLLIDGPLSWYSDPGLAGVSLTGGLSYKEDTKELVVAKAGVYYVFFQLELRRVVAGEGSGSVSLALHLQPLRSAAGAAALALTVDLPPASSEARNSAFGFQGRLLHLSAGQRLGVHLHTEARARHAWQLTQGATVLGLFRVTPEIPAGLGSTGSGSKPGSGEGSTKGREGPELSPDDPAGLLDLRQGMFAQLVAQNVLLIDGPLSWYSDPGLAGVSLTGGLSYKEDTKELVVAKAGVYYVFFQLELRRVVAGEGSGSVSLALHLQPLRSAAGAAALALTVDLPPASSEARNSAFGFQGRLLHLSAGQRLGVHLHTEARARHAWQLTQGATVLGLFRVTPEIPAGLGGGGSGGGGSREGPELSPDDPAGLLDLRQGMFAQLVAQNVLLIDGPLSWYSDPGLAGVSLTGGLSYKEDTKELVVAKAGVYYVFFQLELRRVVAGEGSGSVSLALHLQPLRSAAGAAALALTVDLPPASSEARNSAFGFQGRLLHLSAGQRLGVHLHTEARARHAWQLTQGATVLGLFRVTPEIPAGLSTGGGGSGGGGSEVQLLESGGGLVQPGGSLRLSCAASGFSFSSGYDMCWVRQAPGKGLEWIACIAAGSAGITYDANWAKGRFTISRDNSKNTLYLQMNSLRAEDTAVYYCARSAFSFDYAMDLWGQGTLVTVSSASTKGPSVFPLAPSSKSTSGGTAALGCLVKDYFPEPVTVSWNSGALTSGVHTFPAVLQSSGLYSLSSVVTVPSSSLGTQTYICNVNHKPSNTKVDKRVEPKSCDKTHTCPPCPAPEAAGAPSVFLFPPKPKDTLMISRTPEVTCVVVDVSHEDPEVKFNWYVDGVEVHNAKTKPREEQYNSTYRVVSVLTVLHQDWLNGKEYKCAVSNKALPAPIEKTISKAKGQPREPQVYTLPPSRDELTKNQVSLTCLVKGFYPSDIAVEWESNGQPENNYKTTPPVLDSDGSFFLYSKLTVDKSRWQQGNVFSCSVMHEALHNHYTQKSLSLSPGGGGGSGGGGSEVQLVESGGGLVQPGGSLRLSCAASGFTISTNAMSWVRQAPGKGLEWIGVITGRDITYYASWAKGRFTISRDNSKNTLYLQMNSLRAEDTAVYYCARDGGSSAITSNNIWGQGTLVTVSSGGGGSGGGGSGGGGSGGGGSDVVMTQSPSTLSASVGDRVTINCQASESISSWLAWYQQKPGKAPKLLIYEASKLASGVPSRFSGSGSGTEFTLTISSLQPDDFATYYCQGYFYFISRTYVNSFGGGTKVEIKGGGGSGGGGSGFLNSLFNQEVQIPLTESYCGPCPKNWICYKNNCYQFFDESKNWYESQASCMSQNASLLKVYSKEDQDLLKLVKSYHWMGLVHIPTNGSWQWEDGSILSPNLLTIIEMQKGDCALYASSFKGYIENCSTPNTYICMQRTVGGGGSGGGGSGGGGSGGGGSFLNSLFNQEVQIPLTESYCGPCPKNWICYKNNCYQFFDESKNWYESQASCMSQNASLLKVYSKEDQDLLKLVKSYHWMGLVHIPTNGSWQWEDGSILSPNLLTIIEMQKGDCALYASSFKGYIENCSTPNTYICMQRTV

SEQ ID NO: 27 - DNA, 651 bp, Artificial Sequence; identical to SEQ ID NO: 11
  Synthesized

SEQ ID NO: 28 - protein, 217 aa, Artificial Sequence; identical to SEQ ID NO: 12
  Synthesized

SEQ ID NO: 29 - DNA, 4020 bp, Artificial Sequence
  Synthesized
gacatccagatgacccagtctccttccaccctgtctgcatctgtaggagacagagtcaccatcacttgccaggccagtcagagcattagttcccacttaaactggtatcagcagaaaccagggaaagcccctaagctcctgatctataaggcatccactctggcatctggggtcccatcaaggttcagcggcagtggatctgggacagaatttactctcaccatcagcagcctgcagcctgatgattttgcaacttattactgccaacagggttatagttggggtaatgttgataatgttttcggcggagggaccaaggtggagatcaaaggcggtggcggtagtgggggaggcggttctggcggcggagggtccggcggtggaggatcagaggtgcagctgttggagtctgggggaggcttggtacagcctggggggtccctgagactctcctgtgcagcctctggattctccttcagtagcgggtacgacatgtgctgggtccgccaggctccagggaaggggctggagtggatcgcatgtattgctgctggtagtgctggtatcacttacgacgcgaactgggcgaaaggccggttcaccatctccagagacaattccaagaacacgctgtatctgcaaatgaacagcctgagagccgaggacacggccgtatattactgtgcgagatcggcgttttcgttcgactacgccatggacctctggggccagggaaccctggtcaccgtgtcgacaggcggtggagggtccggcggtggtggatcacgtgaggggccagaactgtcccccgatgacccagccggactgctcgatctcagacagggcatgttcgctcagcttgtagcccaaaatgtcctcctgattgacggccctttgagctggtatagtgatcccggcttggccggggtatctctgaccggaggcctctcctacaaggaagacaccaaagagctggtggtggcaaaagcgggggtgtattatgtgttctttcagctcgagctgcggagagttgtggccggggaagggtctgggagcgtatctcttgcacttcacctgcagcccctgcgcagcgccgctggagccgccgcccttgctcttactgtggatctgcctcctgcttcctcagaagcacgcaacagcgccttcggctttcaaggacgtctcctgcacttgtccgcaggacagaggttgggcgtccatttacacactgaggcacgggcacggcacgcttggcagcttacccagggagccaccgtgctgggactctttagagtgacacccgagatccccgctggcttggctagcaccaagggcccatcggtcttccccctggcaccctcctccaagagcacctctgggggcacagcggccctgggctgcctggtcaaggactacttccccgaaccggtgacggtgtcgtggaactcaggcgccctgaccagcggcgtgcacaccttcccggctgtcctacagtcctcaggactctactccctcagcagcgtggtgaccgtgccctccagcagcttgggcacccagacctacatctgcaacgtgaatcacaagcccagcaacaccaaggtggacaagagagttgagcccaaatcttgtgacaaaactcacacatgcccaccgtgcccagcacctgaagccgcgggggcaccgtcagtcttcctcttccccccaaaacccaaggacaccctcatgatctcccggacccctgaggtcacatgcgtggtggtggacgtgagccacgaagaccctgaggtcaagttcaactggtacgtggacggcgtggaggtgcataatgccaagacaaagccgcgggaggagcagtacaacagcacgtaccgtgtggtcagcgtcctcaccgtcctgcaccaggactggctgaatggcaaggagtacaagtgcgcggtctccaacaaagccctcccagcccccatcgagaaaaccatctccaaagccaaagggcagccccgagaaccacaggtgtacaccctgcccccatcccgggatgagctgaccaagaaccaggtcagcctgacctgcctggtcaaaggcttctatcccagcgacatcgccgtggagtgggagagcaatgggcagccggagaacaactacaagaccacgcctcccgtgctggactccgacggctccttcttcctctatagcaagctcaccgtggacaagagcaggtggcagcaggggaacgtcttctcatgctccgtgatgcatgaggctctgcacaaccactacacgcagaagagcctctccctgtctccgggtggcggtggagggtccggcggtggtggatccgaggtgcagctggtggagtctgggggaggcttggtccagcctggggggtccctgagactctcctgtgcagcctctggattcaccatcagtaccaatgcaatgagctgggtccgccaggctccagggaaggggctggagtggatcggagtcattactggtcgtgatatcacatactacgcgagctgggcgaaaggcagattcaccatctccagagacaattccaagaacacgctgtatcttcaaatgaacagcctgagagccgaggacacggctgtgtattactgtgcgagagacggtggttcttctgctattactagtaacaacatttggggccagggaaccctggtcaccgtctcttcaggcggtggcggtagtgggggaggcggttctggcggcggagggtccggcggtggaggatcagacgtcgtgatgacccagtctccttccaccctgtctgcatctgtaggagacagagtcaccatcaattgccaagccagtgagagcattagcagttggttagcctggtatcagcagaaaccagggaaagcccctaagctcctgatctatgaagcatccaaactggcatctggggtcccatcaaggttcagcggcagtggatctgggacagaatttactctcaccatcagcagcctgcagcctgatgattttgcaacttattactgccaaggctatttttattttattagtcgtacttatgtaaattctttcggcggagggaccaaggtggagatcaaaggcggtggagggtccggcggtggtggctccggatttcttaattcccttttcaaccaagaggttcagatccccttgactgaaagctattgcggcccttgtccgaaaaactggatatgttacaagaataattgttaccaattcttcgacgaaagcaagaactggtatgagagtcaggcgtcttgtatgagtcagaatgccagcctgcttaaggtttattcaaaagaagaccaggatctgcttaagttggtaaagagctaccactggatggggctggtacatatcccaacgaatgggtcatggcagtgggaggacggttctattctgagtccaaatctcctgacgatcatcgaaatgcagaaaggggactgtgccctgtatgcatcatccttcaaggggtacatcgagaactgcagtaccccaaatacctacatttgtatgcaaagaacggttggaggcggtggctcaggcggaggcggctcaggaggtggcggttcaggaggcggcggatctttcctaaactcattattcaaccaagaagttcaaattcccttgaccgaaagttactgtggcccatgtcctaaaaactggatatgttacaaaaataactgctaccaattttttgatgagagtaaaaactggtatgagagccaggcttcttgtatgtctcaaaatgccagccttctgaaagtatacagcaaagaggaccaggatttacttaaactggtgaagtcatatcattggatgggactagtacacattccaacaaatggatcttggcagtgggaagatggctccattctctcacccaacctactaacaataattgaaatgcagaagggagactgtgcactctatgcctcgagctttaaaggctatatagaaaactgttcaactccaaatacgtacatctgcatgcaaaggactgtg

SEQ ID NO: 30 - protein, 1340 aa, Artificial Sequence
  Synthesized
DIQMTQSPSTLSASVGDRVTITCQASQSISSHLNWYQQKPGKAPKLLIYKASTLASGVPSRFSGSGSGTEFTLTISSLQPDDFATYYCQQGYSWGNVDNVFGGGTKVEIKGGGGSGGGGSGGGGSGGGGSEVQLLESGGGLVQPGGSLRLSCAASGFSFSSGYDMCWVRQAPGKGLEWIACIAAGSAGITYDANWAKGRFTISRDNSKNTLYLQMNSLRAEDTAVYYCARSAFSFDYAMDLWGQGTLVTVSTGGGGSGGGGSREGPELSPDDPAGLLDLRQGMFAQLVAQNVLLIDGPLSWYSDPGLAGVSLTGGLSYKEDTKELVVAKAGVYYVFFQLELRRVVAGEGSGSVSLALHLQPLRSAAGAAALALTVDLPPASSEARNSAFGFQGRLLHLSAGQRLGVHLHTEARARHAWQLTQGATVLGLFRVTPEIPAGLASTKGPSVFPLAPSSKSTSGGTAALGCLVKDYFPEPVTVSWNSGALTSGVHTFPAVLQSSGLYSLSSVVTVPSSSLGTQTYICNVNHKPSNTKVDKRVEPKSCDKTHTCPPCPAPEAAGAPSVFLFPPKPKDTLMISRTPEVTCVVVDVSHEDPEVKFNWYVDGVEVHNAKTKPREEQYNSTYRVVSVLTVLHQDWLNGKEYKCAVSNKALPAPIEKTISKAKGQPREPQVYTLPPSRDELTKNQVSLTCLVKGFYPSDIAVEWESNGQPENNYKTTPPVLDSDGSFFLYSKLTVDKSRWQQGNVFSCSVMHEALHNHYTQKSLSLSPGGGGGSGGGGSEVQLVESGGGLVQPGGSLRLSCAASGFTISTNAMSWVRQAPGKGLEWIGVITGRDITYYASWAKGRFTISRDNSKNTLYLQMNSLRAEDTAVYYCARDGGSSAITSNNIWGQGTLVTVSSGGGGSGGGGSGGGGSGGGGSDVVMTQSPSTLSASVGDRVTINCQASESISSWLAWYQQKPGKAPKLLIYEASKLASGVPSRFSGSGSGTEFTLTISSLQPDDFATYYCQGYFYFISRTYVNSFGGGTKVEIKGGGGSGGGGSGFLNSLFNQEVQIPLTESYCGPCPKNWICYKNNCYQFFDESKNWYESQASCMSQNASLLKVYSKEDQDLLKLVKSYHWMGLVHIPTNGSWQWEDGSILSPNLLTIIEMQKGDCALYASSFKGYIENCSTPNTYICMQRTVGGGGSGGGGSGGGGSGGGGSFLNSLFNQEVQIPLTESYCGPCPKNWICYKNNCYQFFDESKNWYESQASCMSQNASLLKVYSKEDQDLLKLVKSYHWMGLVHIPTNGSWQWEDGSILSPNLLTIIEMQKGDCALYASSFKGYIENCSTPNTYICMQRTV

SEQ ID NO: 31 - DNA, 1443 bp, Artificial Sequence
  Synthesized
cgagagggccccgagctgtctcctgatgacccagcaggcctcttggacttgcggcagggtatgttcgctcaacttgtggctcagaatgttctgctcattgatggaccactctcttggtatagtgaccccggtctggccggggtgagtctgaccggcgggctctcttataaagaggatactaaggaactggtcgtagcaaaagcgggcgtttattacgttttttttcagctggagctcaggcgcgtggtggccggcgagggcagtggctctgtgtccctggccctgcacttacagcccttgagaagcgctgcaggtgctgccgcactggctttaactgttgacctccctccggcctcttctgaagctagaaacagcgctttcggcttccaagggcgcctgctgcacctgagcgcaggccagcgcttaggtgtgcaccttcatacagaggccagggcccgacacgcttggcagctcacacagggtgccacggttctcggacttttccgcgttactcccgagatccccgctggcctcggaagtactggttctgggtctaaacccggttccggcgaaggtagtactaaaggacgagaagggccagagttaagtccagatgaccctgctgggcttttggacctgcggcagggcatgttcgctcaactggtggctcagaacgtgctgctgatcgatggccccctgagttggtacagcgatcccgggctggcaggcgtgtcacttacagggggcctctcttacaaggaagacaccaaggagttagtggtcgctaaggctggcgtgtattacgtgttcttccaactggagctgagaagggttgtggcaggagagggtagcggcagcgtgtctttagcccttcacttgcagcccctgaggtctgctgcaggtgcagccgctctcgcgctcaccgtggatctccccccagcctcatctgaagctaggaacagtgcatttggctttcagggacgcttgctgcacctctccgctggacagaggctgggcgtgcaccttcacacagaggcccgtgccaggcatgcatggcagctcactcagggggcaacagtgctgggtctcttccgcgtgactcctgaaataccagctggacttcgtacggtggctgcaccatctgtcttcatcttcccgccatctgatgagcagttgaaatctggaactgcctctgttgtgtgcctgctgaataacttctatcccagagaggccaaagtacagtggaaggtggataacgccctccaatcgggtaactcccaggagagtgtcacagagcaggacagcaaggacagcacctacagcctcagcagcaccctgacgctgagcaaagcagactacgagaaacacaaagtctacgcctgcgaagtcacccatcagggcctgagctcgcccgtcacaaagagcttcaacaggggagagtgt

SEQ ID NO: 32 - protein, 481 aa, Artificial Sequence
  Synthesized
REGPELSPDDPAGLLDLRQGMFAQLVAQNVLLIDGPLSWYSDPGLAGVSLTGGLSYKEDTKELVVAKAGVYYVFFQLELRRVVAGEGSGSVSLALHLQPLRSAAGAAALALTVDLPPASSEARNSAFGFQGRLLHLSAGQRLGVHLHTEARARHAWQLTQGATVLGLFRVTPEIPAGLGSTGSGSKPGSGEGSTKGREGPELSPDDPAGLLDLRQGMFAQLVAQNVLLIDGPLSWYSDPGLAGVSLTGGLSYKEDTKELVVAKAGVYYVFFQLELRRVVAGEGSGSVSLALHLQPLRSAAGAAALALTVDLPPASSEARNSAFGFQGRLLHLSAGQRLGVHLHTEARARHAWQLTQGATVLGLFRVTPEIPAGLRTVAAPSVFIFPPSDEQLKSGTASVVCLLNNFYPREAKVQWKVDNALQSGNSQESVTEQDSKDSTYSLSSTLTLSKADYEKHKVYACEVTHQGLSSPVTKSFNRGEC

SEQ ID NO: 33 - DNA, 3687 bp, Artificial Sequence
  Synthesized
gacgtcgtgatgacccagtctccttccaccctgtctgcatctgtaggagacagagtcaccatcaattgccaagccagtgagagcattagcagttggttagcctggtatcagcagaaaccagggaaagcccctaagctcctgatctatgaagcatccaaactggcatctggggtcccatcaaggttcagcggcagtggatctgggacagaatttactctcaccatcagcagcctgcagcctgatgattttgcaacttattactgccaaggctatttttattttattagtcgtacttatgtaaattctttcggcggagggaccaaggtggagatcaaaggcggtggcggtagtgggggaggcggttctggcggcggagggtccggcggtggaggatcagaggtgcagctggtggagtctgggggaggcttggtccagcctggggggtccctgagactctcctgtgcagcctctggattcaccatcagtaccaatgcaatgagctgggtccgccaggctccagggaaggggctggagtggatcggagtcattactggtcgtgatatcacatactacgcgagctgggcgaaaggcagattcaccatctccagagacaattccaagaacacgctgtatcttcaaatgaacagcctgagagccgaggacacggctgtgtattactgtgcgagagacggtggttcttctgctattactagtaacaacatttggggccagggaaccctggtcaccgtgtcgacaggcggtggagggtccggcggtggtggatcacaggtgcagctgaagcagtcaggacctggcctagtgcagccctcacagagcctgtccatcacctgcacagtctctggtttctcattaactaactatggtgtacactgggttcgccagtctccaggaaagggtctggagtggctgggagtgatatggagtggtggaaacacagactataatacacctttcacatccagactgagcatcaacaaggacaattccaagagccaagttttctttaaaatgaacagtctgcaatctaatgacacagccatatattactgtgccagagccctcacctactatgattacgagtttgcttactggggccaagggactctggtcactgtctctagcgctagcaccaagggcccatcggtcttccccctggcaccctcctccaagagcacctctgggggcacagcggccctgggctgcctggtcaaggactacttccccgaaccggtgacggtgtcgtggaactcaggcgccctgaccagcggcgtgcacaccttcccggctgtcctacagtcctcaggactctactccctcagcagcgtggtgaccgtgccctccagcagcttgggcacccagacctacatctgcaacgtgaatcacaagcccagcaacaccaaggtggacaagagagttgagcccaaatcttgtgacaaaactcacacatgcccaccgtgcccagcacctgaagccgcgggggcaccgtcagtcttcctcttccccccaaaacccaaggacaccctcatgatctcccggacccctgaggtcacatgcgtggtggtggacgtgagccacgaagaccctgaggtcaagttcaactggtacgtggacggcgtggaggtgcataatgccaagacaaagccgcgggaggagcagtacaacagcacgtaccgtgtggtcagcgtcctcaccgtcctgcaccaggactggctgaatggcaaggagtacaagtgcgcggtctccaacaaagccctcccagcccccatcgagaaaaccatctccaaagccaaagggcagccccgagaaccacaggtgtacaccctgcccccatcccgggatgagctgaccaagaaccaggtcagcctgacctgcctggtcaaaggcttctatcccagcgacatcgccgtggagtgggagagcaatgggcagccggagaacaactacaagaccacgcctcccgtgctggactccgacggctccttcttcctctatagcaagctcaccgtggacaagagcaggtggcagcaggggaacgtcttctcatgctccgtgatgcatgaggctctgcacaaccactacacgcagaagagcctctccctgtctccgggtggcggtggagggtccggcggtggtggatccgaggtgcagctgttggagtctgggggaggcttggtacagcctggggggtccctgagactctcctgtgcagcctctggattctccttcagtagcgggtacgacatgtgctgggtccgccaggctccagggaaggggctggagtggatcgcatgcattgctgctggtagtgctggtatcacttacgacgcgaactgggcgaaaggccggttcaccatctccagagacaattccaagaacacgctgtatctgcaaatgaacagcctgagagccgaggacacggccgtatattactgtgcgagatcggcgttttcgttcgactacgccatggacctctggggccagggaaccctggtcaccgtctcgagcggtggaggcggatctggcggaggtggttccggcggtggcggctccggtggaggcggctctgacatccagatgacccagtctccttccaccctgtctgcatctgtaggagacagagtcaccatcacttgccaggccagtcagagcattagttcccacttaaactggtatcagcagaaaccagggaaagcccctaagctcctgatctataaggcatccactctggcatctggggtcccatcaaggttcagcggcagtggatctgggacagaatttactctcaccatcagcagcctgcagcctgatgattttgcaacttattactgccaacagggttatagttggggtaatgttgataatgttttcggcggagggaccaaggtggagatcaaaggcggtggagggtccggcggtggtggctccggacggtcgctggtggagtctgggggaggcttggtccagcctggggggtccctgagactctcctgtactgcctctggattcaccatcagtagctaccacatgcagtgggtccgccaggctccagggaaggggctggagtacatcggaaccattagtagtggtggtaatgtatactacgcaagctccgctagaggcagattcaccatctccagaccctcgtccaagaacacggtggatcttcaaatgaacagcctgagagccgaggacacggctgtgtattactgtgcgagagactctggttatagtgatcctatgtggggccagggaaccctggtcaccgtctcttcaggcggtggcggtagtgggggaggcggttctggcggcggagggtccggcggtggaggatcagacgttgtgatgacccagtctccatcttccgtgtctgcatctgtaggagacagagtcaccatcacctgtcaggccagtcagaacattaggacttacttatcctggtatcagcagaaaccagggaaagcccctaagctcctgatctatgctgcagccaatctggcatctggggtcccatcaaggttcagcggcagtggatctgggacagatttcactctcaccatcagcgacctggagcctggcgatgctgcaacttactattgtcagtctacctatcttggtactgattatgttggcggtgctttcggcggagggaccaaggtggagatcaaa

SEQ ID NO: 34 - protein, 1229 aa, Artificial Sequence
  Synthesized
DVVMTQSPSTLSASVGDRVTINCQASESISSWLAWYQQKPGKAPKLLIYEASKLASGVPSRFSGSGSGTEFTLTISSLQPDDFATYYCQGYFYFISRTYVNSFGGGTKVEIKGGGGSGGGGSGGGGSGGGGSEVQLVESGGGLVQPGGSLRLSCAASGFTISTNAMSWVRQAPGKGLEWIGVITGRDITYYASWAKGRFTISRDNSKNTLYLQMNSLRAEDTAVYYCARDGGSSAITSNNIWGQGTLVTVSTGGGGSGGGGSQVQLKQSGPGLVQPSQSLSITCTVSGFSLTNYGVHWVRQSPGKGLEWLGVIWSGGNTDYNTPFTSRLSINKDNSKSQVFFKMNSLQSNDTAIYYCARALTYYDYEFAYWGQGTLVTVSSASTKGPSVFPLAPSSKSTSGGTAALGCLVKDYFPEPVTVSWNSGALTSGVHTFPAVLQSSGLYSLSSVVTVPSSSLGTQTYICNVNHKPSNTKVDKRVEPKSCDKTHTCPPCPAPEAAGAPSVFLFPPKPKDTLMISRTPEVTCVVVDVSHEDPEVKFNWYVDGVEVHNAKTKPREEQYNSTYRVVSVLTVLHQDWLNGKEYKCAVSNKALPAPIEKTISKAKGQPREPQVYTLPPSRDELTKNQVSLTCLVKGFYPSDIAVEWESNGQPENNYKTTPPVLDSDGSFFLYSKLTVDKSRWQQGNVFSCSVMHEALHNHYTQKSLSLSPGGGGGSGGGGSEVQLLESGGGLVQPGGSLRLSCAASGFSFSSGYDMCWVRQAPGKGLEWIACIAAGSAGITYDANWAKGRFTISRDNSKNTLYLQMNSLRAEDTAVYYCARSAFSFDYAMDLWGQGTLVTVSSGGGGSGGGGSGGGGSGGGGSDIQMTQSPSTLSASVGDRVTITCQASQSISSHLNWYQQKPGKAPKLLIYKASTLASGVPSRFSGSGSGTEFTLTISSLQPDDFATYYCQQGYSWGNVDNVFGGGTKVEIKGGGGSGGGGSGRSLVESGGGLVQPGGSLRLSCTASGFTISSYHMQWVRQAPGKGLEYIGTISSGGNVYYASSARGRFTISRPSSKNTVDLQMNSLRAEDTAVYYCARDSGYSDPMWGQGTLVTVSSGGGGSGGGGSGGGGSGGGGSDVVMTQSPSSVSASVGDRVTITCQASQNIRTYLSWYQQKPGKAPKLLIYAAANLASGVPSRFSGSGSGTDFTLTISDLEPGDAATYYCQSTYLGTDYVGGAFGGGTKVEIK

SEQ ID NO: 35 - DNA, 1419 bp, Artificial Sequence
  Synthesized
gacatcttgctgactcagtctccagtcatcctgtctgtgagtccaggagaaagagtcagtttctcctgcagggccagtcagagtattggcacaaacatacactggtatcagcaaagaacaaatggttctccaaggcttctcataaagtatgcttctgagtctatctctgggattccttccaggtttagtggcagtggatcagggacagattttactcttagcatcaacagtgtggagtctgaagatattgcagattattactgtcaacaaaataataactggccaaccacgttcggtgctgggaccaagctggagctgaaacgtacggtggctgcaccatctgtcttcatcttcccgccatctgatgagcagttgaaatctggaactgcctctgttgtgtgcctgctgaataacttctatcccagagaggccaaagtacagtggaaggtggataacgccctccaatcgggtaactcccaggagagtgtcacagagcaggacagcaaggacagcacctacagcctcagcagcaccctgacgctgagcaaagcagactacgagaaacacaaagtctacgcctgcgaagtcacccatcagggcctgagctcgcccgtcacaaagagcttcaacaggggagagtgtggcggtggagggtccggcggtggtggatcccagtctgccctgactcagcctgcctccgtgtctgggtctcctggacagtcgatcaccatctcctgcactggaaccagcagtgacgttggtggttataactttgtctcctggtaccaacaacacccaggcaaagcccccaaactcatgatctatgatgtcagtgatcggccctcaggggtgtctgatcgcttctccggctccaagtctggcaacacggcctccctgatcatctctggcctccaggctgacgacgaggctgattattactgcagctcatatgggagcagcagcactcatgtgattttcggcggagggaccaaggtgaccgtcctaggtggaggcggttcaggcggaggtggttccggcggtggcggctccggtggaggcggctctcaggtgcaattgcaggagtcggggggaggcctggtcaagcctggagggtccctgagactctcctgtgcagcctctggattcacctttagtagttattggatgagctgggtccgccaggctccagggaaggggctggagtgggtggccaacataaaccgcgatggaagtgcgagttactatgtggactctgtgaagggccgattcaccatctccagagacgacgccaagaactcactgtatctgcaaatgaacagcctgagagctgaggacacggctgtgtattactgtgcgagagatcgtggggtgggctacttcgatctctggggccgtggcaccctggtcaccgtctcgagc

SEQ ID NO: 36 - protein, 473 aa, Artificial Sequence
  Synthesized
DILLTQSPVILSVSPGERVSFSCRASQSIGTNIHWYQQRTNGSPRLLIKYASESISGIPSRFSGSGSGTDFTLSINSVESEDIADYYCQQNNNWPTTFGAGTKLELKRTVAAPSVFIFPPSDEQLKSGTASVVCLLNNFYPREAKVQWKVDNALQSGNSQESVTEQDSKDSTYSLSSTLTLSKADYEKHKVYACEVTHQGLSSPVTKSFNRGECGGGGSGGGGSQSALTQPASVSGSPGQSITISCTGTSSDVGGYNFVSWYQQHPGKAPKLMIYDVSDRPSGVSDRFSGSKSGNTASLIISGLQADDEADYYCSSYGSSSTHVIFGGGTKVTVLGGGGSGGGGSGGGGSGGGGSQVQLQESGGGLVKPGGSLRLSCAASGFTFSSYWMSWVRQAPGKGLEWVANINRDGSASYYVDSVKGRFTISRDDAKNSLYLQMNSLRAEDTAVYYCARDRGVGYFDLWGRGTLVTVSS

SEQ ID NO: 37 - DNA, 3687 bp, Artificial Sequence
  Synthesized
gacgtcgtgatgacccagtctccttccaccctgtctgcatctgtaggagacagagtcaccatcaattgccaagccagtgagagcattagcagttggttagcctggtatcagcagaaaccagggaaagcccctaagctcctgatctatgaagcatccaaactggcatctggggtcccatcaaggttcagcggcagtggatctgggacagaatttactctcaccatcagcagcctgcagcctgatgattttgcaacttattactgccaaggctatttttattttattagtcgtacttatgtaaattctttcggctgtgggaccaaggtggagatcaaaggtggaggcggttcaggcggaggtggaagtggtggtggcggctctggaggcggcggatctgaggtgcagctggtggagtctgggggaggcttggtccagcctggggggtccctgagactctcctgtgcagcctctggattcaccatcagtaccaatgcaatgagctgggtccgccaggctccagggaagtgcctggagtggatcggagtcattactggtcgtgatatcacatactacgcgagctgggcgaaaggcagattcaccatctccagagacaattccaagaacacgctgtatcttcaaatgaacagcctgagagccgaggacacggctgtgtattactgtgcgagagacggtggttcttctgctattactagtaacaacatttggggccagggaaccctggtcaccgtgtcgacaggcggtggagggtccggcggtggtggatcacaggtgcagctgaagcagtcaggacctggcctagtgcagccctcacagagcctgtccatcacctgcacagtctctggtttctcattaactaactatggtgtacactgggttcgccagtctccaggaaagggtctggagtggctgggagtgatatggagtggtggaaacacagactataatacacctttcacatccagactgagcatcaacaaggacaattccaagagccaagttttctttaaaatgaacagtctgcaatctaatgacacagccatatattactgtgccagagccctcacctactatgattacgagtttgcttactggggccaagggactctggtcactgtctctagcgctagcaccaagggcccatcggtcttccccctggcaccctcctccaagagcacctctgggggcacagcggccctgggctgcctggtcaaggactacttccccgaaccggtgacggtgtcgtggaactcaggcgccctgaccagcggcgtgcacaccttcccggctgtcctacagtcctcaggactctactccctcagcagcgtggtgaccgtgccctccagcagcttgggcacccagacctacatctgcaacgtgaatcacaagcccagcaacaccaaggtggacaagagagttgagcccaaatcttgtgacaaaactcacacatgcccaccgtgcccagcacctgaagccgcggggggaccgtcagtcttcctcttccccccaaaacccaaggacaccctcatgatctcccggacccctgaggtcacatgcgtggtggtggacgtgagccacgaagaccctgaggtcaagttcaactggtacgtggacggcgtggaggtgcataatgccaagacaaagccgcgggaggagcagtacgccagcacgtaccgtgtggtcagcgtcctcaccgtcctgcaccaggactggctgaatggcaaggagtacaagtgcgcggtctccaacaaagccctcccagcccccatcgagaaaaccatctccaaagccaaagggcagccccgagaaccacaggtgtacaccctgcccccatcccgggatgagctgaccaagaaccaggtcagcctgacctgcctggtcaaaggcttctatcccagcgacatcgccgtggagtgggagagcaatgggcagccggagaacaactacaagaccacgcctcccgtgctggactccgacggctccttcttcctctatagcaagctcaccgtggacaagagcaggtggcagcaggggaacgtcttctcatgctccgtgatgcatgaggctctgcacaaccactacacgcagaagagcctctccctgtctccgggtggcggtggagggtccggcggtggtggatccgaggtgcagctgttggagtctgggggaggcttggtacagcctggggggtccctgagactctcctgtgcagcctctggattctccttcagtagcgggtacgacatgtgctgggtccgccaggctccagggaagtgcctggagtggatcgcatgcattgctgctggtagtgctggtatcacttacgacgcgaactgggcgaaaggccggttcaccatctccagagacaattccaagaacacgctgtatctgcaaatgaacagcctgagagccgaggacacggccgtatattactgtgcgagatcggcgttttcgttcgactacgccatggacctctggggccagggaaccctggtcaccgtctcgagcggtggaggcggttcaggcggaggtggaagtggtggtggcggctctggaggcggcggatctgacatccagatgacccagtctccttccaccctgtctgcatctgtaggagacagagtcaccatcacttgccaggccagtcagagcattagttcccacttaaactggtatcagcagaaaccagggaaagcccctaagctcctgatctataaggcatccactctggcatctggggtcccatcaaggttcagcggcagtggatctgggacagaatttactctcaccatcagcagcctgcagcctgatgattttgcaacttattactgccaacagggttatagttggggtaatgttgataatgttttcggctgcgggaccaaggtggagatcaaaggtggtggcggctctggaggaggagggtccggacggtcgctggtggagtctgggggaggcttggtccagcctggggggtccctgagactctcctgtactgcctctggattcaccatcagtagctaccacatgcagtgggtccggcaggcacctgggaagtgcctggagtacatcggaaccattagtagtggtggtaatgtatactacgcaagctccgctagaggcagattcaccatctccagaccctcgtccaagaacacggtggatcttcaaatgaacagcctgagagccgaggacacggctgtgtattactgtgcgagagactctggttatagtgatcctatgtggggccagggaaccctggtcaccgtctcttcaggcggtggcggtagtgggggaggcggttctggcggcggagggtccggcggtggaggatcagacgttgtgatgacccagtctccatcttccgtgtctgcatctgtaggagacagagtcaccatcacctgtcaggccagtcagaacattaggacttacttatcctggtatcagcagaaaccagggaaagcccctaagctcctgatctatgctgcagccaatctggcatctggggtcccatcaaggttcagcggcagtggatctgggacagatttcactctcaccatcagcgacttggaacctggcgatgctgcaacttactattgtcagtctacctatcttggtactgattatgttggcggtgctttcggctgtgggaccaaggtggagatcaaa

SEQ ID NO: 38 - protein, 1229 aa, Artificial Sequence
  Synthesized
DVVMTQSPSTLSASVGDRVTINCQASESISSWLAWYQQKPGKAPKLLIYEASKLASGVPSRFSGSGSGTEFTLTISSLQPDDFATYYCQGYFYFISRTYVNSFGCGTKVEIKGGGGSGGGGSGGGGSGGGGSEVQLVESGGGLVQPGGSLRLSCAASGFTISTNAMSWVRQAPGKCLEWIGVITGRDITYYASWAKGRFTISRDNSKNTLYLQMNSLRAEDTAVYYCARDGGSSAITSNNIWGQGTLVTVSTGGGGSGGGGSQVQLKQSGPGLVQPSQSLSITCTVSGFSLTNYGVHWVRQSPGKGLEWLGVIWSGGNTDYNTPFTSRLSINKDNSKSQVFFKMNSLQSNDTAIYYCARALTYYDYEFAYWGQGTLVTVSSASTKGPSVFPLAPSSKSTSGGTAALGCLVKDYFPEPVTVSWNSGALTSGVHTFPAVLQSSGLYSLSSVVTVPSSSLGTQTYICNVNHKPSNTKVDKRVEPKSCDKTHTCPPCPAPEAAGGPSVFLFPPKPKDTLMISRTPEVTCVVVDVSHEDPEVKFNWYVDGVEVHNAKTKPREEQYASTYRVVSVLTVLHQDWLNGKEYKCAVSNKALPAPIEKTISKAKGQPREPQVYTLPPSRDELTKNQVSLTCLVKGFYPSDIAVEWESNGQPENNYKTTPPVLDSDGSFFLYSKLTVDKSRWQQGNVFSCSVMHEALHNHYTQKSLSLSPGGGGGSGGGGSEVQLLESGGGLVQPGGSLRLSCAASGFSFSSGYDMCWVRQAPGKCLEWIACIAAGSAGITYDANWAKGRFTISRDNSKNTLYLQMNSLRAEDTAVYYCARSAFSFDYAMDLWGQGTLVTVSSGGGGSGGGGSGGGGSGGGGSDIQMTQSPSTLSASVGDRVTITCQASQSISSHLNWYQQKPGKAPKLLIYKASTLASGVPSRFSGSGSGTEFTLTISSLQPDDFATYYCQQGYSWGNVDNVFGCGTKVEIKGGGGSGGGGSGRSLVESGGGLVQPGGSLRLSCTASGFTISSYHMQWVRQAPGKCLEYIGTISSGGNVYYASSARGRFTISRPSSKNTVDLQMNSLRAEDTAVYYCARDSGYSDPMWGQGTLVTVSSGGGGSGGGGSGGGGSGGGGSDVVMTQSPSSVSASVGDRVTITCQASQNIRTYLSWYQQKPGKAPKLLIYAAANLASGVPSRFSGSGSGTDFTLTISDLEPGDAATYYCQSTYLGTDYVGGAFGCGTKVEIK

SEQ ID NO: 39 - DNA, 1419 bp, Artificial Sequence
  Synthesized
gacatcttgctgactcagtctccagtcatcctgtctgtgagtccaggagaaagagtcagtttctcctgcagggccagtcagagtattggcacaaacatacactggtatcagcaaagaacaaatggttctccaaggcttctcataaagtatgcttctgagtctatctctgggattccttccaggtttagtggcagtggatcagggacagattttactcttagcatcaacagtgtggagtctgaagatattgcagattattactgtcaacaaaataataactggccaaccacgttcggtgctgggaccaagctggagctgaaacgtacggtggctgcaccatctgtcttcatcttcccgccatctgatgagcagttgaaatctggaactgcctctgttgtgtgcctgctgaataacttctatcccagagaggccaaagtacagtggaaggtggataacgccctccaatcgggtaactcccaggagagtgtcacagagcaggacagcaaggacagcacctacagcctcagcagcaccctgacgctgagcaaagcagactacgagaaacacaaagtctacgcctgcgaagtcacccatcagggcctgagctcgcccgtcacaaagagcttcaacaggggagagtgtggcggtggagggtccggcggtggtggatcccagtctgccctgactcagcctgcctccgtgtctgggtctcctggacagtcgatcaccatctcctgcactggaaccagcagtgacgttggtggttataactttgtctcctggtaccaacaacacccaggcaaagcccccaaactcatgatctatgatgtcagtgatcggccctcaggggtgtctgatcgcttctccggctccaagtctggcaacacggcctccctgatcatctctggcctccaggctgacgacgaggctgattattactgcagctcatatgggagcagcagcactcatgtgattttcggctgcgggaccaaggtgaccgtcctaggtggaggcggttcaggcggaggtggttccggcggtggcggctccggtggaggcggctctcaggtgcaattgcaggagtcggggggaggcctggtcaagcctggagggtccctgagactctcctgtgcagcctctggattcacctttagtagttattggatgagctgggtccgccaggctccagggaagtgcctggagtgggtggccaacataaaccgcgatggaagtgcgagttactatgtggactctgtgaagggccgattcaccatctccagagacgacgccaagaactcactgtatctgcaaatgaacagcctgagagctgaggacacggctgtgtattactgtgcgagagatcgtggggtgggctacttcgatctctggggccgtggcaccctggtcaccgtctcgagc

SEQ ID NO: 40 - protein, 473 aa, Artificial Sequence
  Synthesized
DILLTQSPVILSVSPGERVSFSCRASQSIGTNIHWYQQRTNGSPRLLIKYASESISGIPSRFSGSGSGTDFTLSINSVESEDIADYYCQQNNNWPTTFGAGTKLELKRTVAAPSVFIFPPSDEQLKSGTASVVCLLNNFYPREAKVQWKVDNALQSGNSQESVTEQDSKDSTYSLSSTLTLSKADYEKHKVYACEVTHQGLSSPVTKSFNRGECGGGGSGGGGSQSALTQPASVSGSPGQSITISCTGTSSDVGGYNFVSWYQQHPGKAPKLMIYDVSDRPSGVSDRFSGSKSGNTASLIISGLQADDEADYYCSSYGSSSTHVIFGCGTKVTVLGGGGSGGGGSGGGGSGGGGSQVQLQESGGGLVKPGGSLRLSCAASGFTFSSYWMSWVRQAPGKCLEWVANINRDGSASYYVDSVKGRFTISRDDAKNSLYLQMNSLRAEDTAVYYCARDRGVGYFDLWGRGTLVTVSS

SEQ ID NO: 41 - DNA, 3687 bp, Artificial Sequence
  Synthesized
gacgtcgtgatgacccagtctccttccaccctgtctgcatctgtaggagacagagtcaccatcaattgccaagccagtgagagcattagcagttggttagcctggtatcagcagaaaccagggaaagcccctaagctcctgatctatgaagcatccaaactggcatctggggtcccatcaaggttcagcggcagtggatctgggacagaatttactctcaccatcagcagcctgcagcctgatgattttgcaacttattactgccaaggctatttttattttattagtcgtacttatgtaaattctttcggctgtgggaccaaggtggagatcaaaggtggaggcggttcaggcggaggtggaagtggtggtggcggctctggaggcggcggatctgaggtgcagctggtggagtctgggggaggcttggtccagcctggggggtccctgagactctcctgtgcagcctctggattcaccatcagtaccaatgcaatgagctgggtccgccaggctccagggaagtgcctggagtggatcggagtcattactggtcgtgatatcacatactacgcgagctgggcgaaaggcagattcaccatctccagagacaattccaagaacacgctgtatcttcaaatgaacagcctgagagccgaggacacggctgtgtattactgtgcgagagacggtggttcttctgctattactagtaacaacatttggggccagggaaccctggtcaccgtgtcgacaggcggtggagggtccggcggtggtggatcacaggtgcagctgcaggagtcgggcccaggactggtgaagccttcggagaccctgtccctcacctgcactgtctctggtggctccgtcagcagtggtgattactactggacctggatccggcagtccccagggaagggactggagtggattggacacatctattacagtgggaacaccaattataacccctccctcaagagccgactcaccatatcaattgacacgtccaagactcagttctccctgaagctgagttctgtgaccgctgcggacacggccatttattactgtgtgcgagatcgagtgactggtgcttttgatatctggggccaagggacaatggtcaccgtctcgagcgctagcaccaagggcccatcggtcttccccctggcaccctcctccaagagcacctctgggggcacagcggccctgggctgcctggtcaaggactacttccccgaaccggtgacggtgtcgtggaactcaggcgccctgaccagcggcgtgcacaccttcccggctgtcctacagtcctcaggactctactccctcagcagcgtggtgaccgtgccctccagcagcttgggcacccagacctacatctgcaacgtgaatcacaagcccagcaacaccaaggtggacaagagagttgagcccaaatcttgtgacaaaactcacacatgcccaccgtgcccagcacctgaagccgcggggggaccgtcagtcttcctcttccccccaaaacccaaggacaccctcatgatctcccggacccctgaggtcacatgcgtggtggtggacgtgagccacgaagaccctgaggtcaagttcaactggtacgtggacggcgtggaggtgcataatgccaagacaaagccgcgggaggagcagtacgccagcacgtaccgtgtggtcagcgtcctcaccgtcctgcaccaggactggctgaatggcaaggagtacaagtgcgcggtctccaacaaagccctcccagcccccatcgagaaaaccatctccaaagccaaagggcagccccgagaaccacaggtgtacaccctgcccccatcccgggatgagctgaccaagaaccaggtcagcctgacctgcctggtcaaaggcttctatcccagcgacatcgccgtggagtgggagagcaatgggcagccggagaacaactacaagaccacgcctcccgtgctggactccgacggctccttcttcctctatagcaagctcaccgtggacaagagcaggtggcagcaggggaacgtcttctcatgctccgtgatgcatgaggctctgcacaaccactacacgcagaagagcctctccctgtctccgggtggcggtggagggtccggcggtggtggatccgaggtgcagctgttggagtctgggggaggcttggtacagcctggggggtccctgagactctcctgtgcagcctctggattctccttcagtagcgggtacgacatgtgctgggtccgccaggctccagggaagtgcctggagtggatcgcatgcattgctgctggtagtgctggtatcacttacgacgcgaactgggcgaaaggccggttcaccatctccagagacaattccaagaacacgctgtatctgcaaatgaacagcctgagagccgaggacacggccgtatattactgtgcgagatcggcgttttcgttcgactacgccatggacctctggggccagggaaccctggtcaccgtctcgagcggtggaggcggttcaggcggaggtggaagtggtggtggcggctctggaggcggcggatctgacatccagatgacccagtctccttccaccctgtctgcatctgtaggagacagagtcaccatcacttgccaggccagtcagagcattagttcccacttaaactggtatcagcagaaaccagggaaagcccctaagctcctgatctataaggcatccactctggcatctggggtcccatcaaggttcagcggcagtggatctgggacagaatttactctcaccatcagcagcctgcagcctgatgattttgcaacttattactgccaacagggttatagttggggtaatgttgataatgttttcggctgcgggaccaaggtggagatcaaaggtggtggcggctctggaggaggagggtccggacggtcgctggtggagtctgggggaggcttggtccagcctggggggtccctgagactctcctgtactgcctctggattcaccatcagtagctaccacatgcagtgggtccggcaggcacctgggaagtgcctggagtacatcggaaccattagtagtggtggtaatgtatactacgcaagctccgctagaggcagattcaccatctccagaccctcgtccaagaacacggtggatcttcaaatgaacagcctgagagccgaggacacggctgtgtattactgtgcgagagactctggttatagtgatcctatgtggggccagggaaccctggtcaccgtctcttcaggcggtggcggtagtgggggaggcggttctggcggcggagggtccggcggtggaggatcagacgttgtgatgacccagtctccatcttccgtgtctgcatctgtaggagacagagtcaccatcacctgtcaggccagtcagaacattaggacttacttatcctggtatcagcagaaaccagggaaagcccctaagctcctgatctatgctgcagccaatctggcatctggggtcccatcaaggttcagcggcagtggatctgggacagatttcactctcaccatcagcgacttggaacctggcgatgctgcaacttactattgtcagtctacctatcttggtactgattatgttggcggtgctttcggctgtgggaccaaggtggagatcaaa

SEQ ID NO: 42 - protein, 1229 aa, Artificial Sequence
  Synthesized
DVVMTQSPSTLSASVGDRVTINCQASESISSWLAWYQQKPGKAPKLLIYEASKLASGVPSRFSGSGSGTEFTLTISSLQPDDFATYYCQGYFYFISRTYVNSFGCGTKVEIKGGGGSGGGGSGGGGSGGGGSEVQLVESGGGLVQPGGSLRLSCAASGFTISTNAMSWVRQAPGKCLEWIGVITGRDITYYASWAKGRFTISRDNSKNTLYLQMNSLRAEDTAVYYCARDGGSSAITSNNIWGQGTLVTVSTGGGGSGGGGSQVQLQESGPGLVKPSETLSLTCTVSGGSVSSGDYYWTWIRQSPGKGLEWIGHIYYSGNTNYNPSLKSRLTISIDTSKTQFSLKLSSVTAADTAIYYCVRDRVTGAFDIWGQGTMVTVSSASTKGPSVFPLAPSSKSTSGGTAALGCLVKDYFPEPVTVSWNSGALTSGVHTFPAVLQSSGLYSLSSVVTVPSSSLGTQTYICNVNHKPSNTKVDKRVEPKSCDKTHTCPPCPAPEAAGGPSVFLFPPKPKDTLMISRTPEVTCVVVDVSHEDPEVKFNWYVDGVEVHNAKTKPREEQYASTYRVVSVLTVLHQDWLNGKEYKCAVSNKALPAPIEKTISKAKGQPREPQVYTLPPSRDELTKNQVSLTCLVKGFYPSDIAVEWESNGQPENNYKTTPPVLDSDGSFFLYSKLTVDKSRWQQGNVFSCSVMHEALHNHYTQKSLSLSPGGGGGSGGGGSEVQLLESGGGLVQPGGSLRLSCAASGFSFSSGYDMCWVRQAPGKCLEWIACIAAGSAGITYDANWAKGRFTISRDNSKNTLYLQMNSLRAEDTAVYYCARSAFSFDYAMDLWGQGTLVTVSSGGGGSGGGGSGGGGSGGGGSDIQMTQSPSTLSASVGDRVTITCQASQSISSHLNWYQQKPGKAPKLLIYKASTLASGVPSRFSGSGSGTEFTLTISSLQPDDFATYYCQQGYSWGNVDNVFGCGTKVEIKGGGGSGGGGSGRSLVESGGGLVQPGGSLRLSCTASGFTISSYHMQWVRQAPGKCLEYIGTISSGGNVYYASSARGRFTISRPSSKNTVDLQMNSLRAEDTAVYYCARDSGYSDPMWGQGTLVTVSSGGGGSGGGGSGGGGSGGGGSDVVMTQSPSSVSASVGDRVTITCQASQNIRTYLSWYQQKPGKAPKLLIYAAANLASGVPSRFSGSGSGTDFTLTISDLEPGDAATYYCQSTYLGTDYVGGAFGCGTKVEIK

SEQ ID NO: 43 - protein, 1419 aa, Artificial Sequence
  Synthesized
GACATCCAGATGACCCAGTCTCCATCCTCCCTGTCTGCATCTGTAGGAGACAGAGTCACCATCACTTGCCAGGCGAGTCAGGACATCAGCAACTATTTAAATTGGTATCAGCAGAAACCAGGGAAAGCCCCTAAACTCCTGATCTACGATGCATCCAATTTGGAAACAGGGGTCCCATCAAGGTTCAGTGGAAGTGGATCTGGGACAGATTTTACTTTCACCATCAGCAGCCTGCAGCCTGAAGATATTGCAACATATTTCTGTCAACACTTTGATCATCTCCCGCTCGCTTTCGGCGGAGGGACCAAGGTGGAAATTAAACGTACGGTGGCTGCACCATCTGTCTTCATCTTCCCGCCATCTGATGAGCAGTTGAAATCTGGAACTGCCTCTGTTGTGTGCCTGCTGAATAACTTCTATCCCAGAGAGGCCAAAGTACAGTGGAAGGTGGATAACGCCCTCCAATCGGGTAACTCCCAGGAGAGTGTCACAGAGCAGGACAGCAAGGACAGCACCTACAGCCTCAGCAGCACCCTGACGCTGAGCAAAGCAGACTACGAGAAACACAAAGTCTACGCCTGCGAAGTCACCCATCAGGGCCTGAGCTCGCCCGTCACAAAGAGCTTCAACAGGGGAGAGTGTGGCGGTGGAGGGTCCGGCGGTGGTGGATCCCAGTCTGCCCTGACTCAGCCTGCCTCCGTGTCTGGGTCTCCTGGACAGTCGATCACCATCTCCTGCACTGGAACCAGCAGTGACGTTGGTGGTTATAACTTTGTCTCCTGGTACCAACAACACCCAGGCAAAGCCCCCAAACTCATGATCTATGATGTCAGTGATCGGCCCTCAGGGGTGTCTGATCGCTTCTCCGGCTCCAAGTCTGGCAACACGGCCTCCCTGATCATCTCTGGCCTCCAGGCTGACGACGAGGCTGATTATTACTGCAGCTCATATGGGAGCAGCAGCACTCATGTGATTTTCGGCTGCGGGACCAAGGTGACCGTCCTAGGTGGAGGCGGTTCAGGCGGAGGTGGTTCCGGCGGTGGCGGCTCCGGTGGAGGCGGCTCTCAGGTGCAATTGCAGGAGTCGGGGGGAGGCCTGGTCAAGCCTGGAGGGTCCCTGAGACTCTCCTGTGCAGCCTCTGGATTCACCTTTAGTAGTTATTGGATGAGCTGGGTCCGCCAGGCTCCAGGGAAGTGCCTGGAGTGGGTGGCCAACATAAACCGCGATGGAAGTGCGAGTTACTATGTGGACTCTGTGAAGGGCCGATTCACCATCTCCAGAGACGACGCCAAGAACTCACTGTATCTGCAAATGAACAGCCTGAGAGCTGAGGACACGGCTGTGTATTACTGTGCGAGAGATCGTGGGGTGGGCTACTTCGATCTCTGGGGCCGTGGCACCCTGGTCACCGTCTCGAGC

SEQ ID NO: 44 - protein, 473 aa, Artificial Sequence
  Synthesized
DIQMTQSPSSLSASVGDRVTITCQASQDISNYLNWYQQKPGKAPKLLIYDASNLETGVPSRFSGSGSGTDFTFTISSLQPEDIATYFCQHFDHLPLAFGGGTKVEIKRTVAAPSVFIFPPSDEQLKSGTASVVCLLNNFYPREAKVQWKVDNALQSGNSQESVTEQDSKDSTYSLSSTLTLSKADYEKHKVYACEVTHQGLSSPVTKSFNRGECGGGGSGGGGSQSALTQPASVSGSPGQSITISCTGTSSDVGGYNFVSWYQQHPGKAPKLMIYDVSDRPSGVSDRFSGSKSGNTASLIISGLQADDEADYYCSSYGSSSTHVIFGCGTKVTVLGGGGSGGGGSGGGGSGGGGSQVQLQESGGGLVKPGGSLRLSCAASGFTFSSYWMSWVRQAPGKCLEWVANINRDGSASYYVDSVKGRFTISRDDAKNSLYLQMNSLRAEDTAVYYCARDRGVGYFDLWGRGTLVTVSS

SEQ ID NO: 45 - DNA, 3693 bp, Artificial Sequence
  Synthesized
gacgtcgtgatgacccagtctccttccaccctgtctgcatctgtaggagacagagtcaccatcaattgccaagccagtgagagcattagcagttggttagcctggtatcagcagaaaccagggaaagcccctaagctcctgatctatgaagcatccaaactggcatctggggtcccatcaaggttcagcggcagtggatctgggacagagttcactctcaccatcagcagcctgcagcctgatgattttgcaacttattactgccaaggctatttttattttattagtcgtacttatgtaaattctttcggcggagggaccaaggtggagatcaaaggcggtggcggtagtgggggaggcggttctggcggcggagggtccggcggtggaggatcagaggtgcagctggtggagtctgggggaggcttggtccagcctggggggtccctgagactctcctgtgcagcctctggattcaccatcagtaccaatgcaatgagctgggtccgccaggctccagggaaggggctggagtggatcggagtcattactggtcgtgatatcacatactacgcgagctgggcgaaaggcagattcaccatctccagagacaattccaagaacacgctgtatcttcaaatgaacagcctgagagccgaggacacggctgtgtattactgtgcgcgcgacggtggatcatctgctattactagtaacaacatttggggccaaggaactctggtcaccgtttcttcaggcggtggagggtccggcggtggtggatccgatgtgcagcttcaggagtcgggacctagcctggtgaaaccttctcagtctctgtccctcacctgcactgtcactggctactcaatcaccagtgattttgcctggaactggattcggcagtttccaggaaacaagctggagtggatgggctacataagttatagtggtaacactaggtacaacccatctctcaaaagtcgaatctctatcactcgcgacacatccaagaaccaattcttcctgcagttgaactctgtgactattgaggacacagccacatattactgtgtaacggcgggacgcgggtttccttattggggccaagggactctggtcactgtctctgcagctagcaccaagggcccatcggtcttccccctggcaccctcctccaagagcacctctgggggcacagcggccctgggctgcctggtcaaggactacttccccgaaccggtgacggtgtcgtggaactcaggcgccctgaccagcggcgtgcacaccttcccggctgtcctacagtcctcaggactctactccctcagcagcgtggtgaccgtgccctccagcagcttgggcacccagacctacatctgcaacgtgaatcacaagcccagcaacaccaaggtggacaagagagttgagcccaaatcttgtgacaaaactcacacatgcccaccgtgcccagcacctgaagccgcgggggcaccgtcagtcttcctcttccccccaaaacccaaggacaccctcatgatctcccggacccctgaggtcacatgcgtggtggtggacgtgagccacgaagaccctgaggtcaagttcaactggtacgtggacggcgtggaggtgcataatgccaagacaaagccgcgggaggagcagtacaacagcacgtaccgtgtggtcagcgtcctcaccgtcctgcaccaggactggctgaatggcaaggagtacaagtgcgcggtctccaacaaagccctcccagcccccatcgagaaaaccatctccaaagccaaagggcagccccgagaaccacaggtgtacaccctgcccccatcccgggatgagctgaccaagaaccaggtcagcctgacctgcctggtcaaaggcttctatcccagcgacatcgccgtggagtgggagagcaatgggcagccggagaacaactacaagaccacgcctcccgtgctggactccgacggctccttcttcctctatagcaagctcaccgtggacaagagcaggtggcagcaggggaacgtcttctcatgctccgtgatgcatgaggctctgcacaaccactacacgcagaagagcctctccctgtctccgggtggcggtggagggtccggcggtggtggatccgaggtgcagctgttggagtctgggggaggcttggtacagcctggggggtccctgagactctcctgtgcagcctctggattctccttcagtagcgggtacgacatgtgctgggtccgccaggctccagggaaggggctggagtggatcgcatgcattgctgctggtagtgctggtatcacttacgacgcgaactgggcgaaaggccggttcaccatctccagagacaattccaagaacacgctgtatctgcaaatgaacagcctgagagccgaggacacggccgtatattactgtgcgagatcggcgttttcgttcgactacgccatggacctctggggccagggaaccctggtcaccgtctcgagcggcggtggcggtagtgggggaggcggttctggcggcggagggtccggcggtggaggatcagacatccagatgacccagtctccttccaccctgtctgcatctgtaggagacagagtcaccatcacttgccaggccagtcagagcattagttcccacttaaactggtatcagcagaaaccagggaaagcccctaagctcctgatctataaggcatccactctggcatctggggtcccatcaaggttcagcggcagtggatctgggacagaatttactctcaccatcagcagcctgcagcctgatgattttgcaacttattactgccaacagggttatagttggggtaatgttgataatgttttcggcggagggaccaaggtggagatcaaaggcggtggagggtccggcggtggtggatcccagtcgctggtggagtctgggggaggcttggtacagcctggggggtccctgagactctcctgtgcagcctctggattctccttcagtagcaactactggatatgctgggtccgccaggctccagggaaggggctggagtggatcgcatgtatttatgttggtagtagtggtgacacttactacgcgagctccgcgaaaggccggttcaccatctccagagacaattccaagaacacgctgtatctgcaaatgaacagcctgagagccgaggacacggccgtatattactgtgcgagagatagtagtagttattatatgtttaacttgtggggccagggaaccctggtcaccgtctcttcaggcggtggcggtagtgggggaggcggttctggcggcggagggtccggcggtggaggatcagcccttgtgatgacccagtctccttccaccctgtctgcatctgtaggagacagagtcaccatcaattgccaggccagtgaggacattgatacctatttagcctggtatcagcagaaaccagggaaagcccctaagctcctgatcttttacgcatccgatctggcatctggggtcccatcaaggttcagcggcagtggatctgggacagaatttactctcaccatcagcagcctgcagcctgatgattttgcaacttattactgccaaggcggttactatactagtagtgctgatacgaggggtgctttcggcggagggaccaaggtggagatcaaa

SEQ ID NO: 46 - protein, 1231 aa, Artificial Sequence
  Synthesized
DVVMTQSPSTLSASVGDRVTINCQASESISSWLAWYQQKPGKAPKLLIYEASKLASGVPSRFSGSGSGTEFTLTISSLQPDDFATYYCQGYFYFISRTYVNSFGGGTKVEIKGGGGSGGGGSGGGGSGGGGSEVQLVESGGGLVQPGGSLRLSCAASGFTISTNAMSWVRQAPGKGLEWIGVITGRDITYYASWAKGRFTISRDNSKNTLYLQMNSLRAEDTAVYYCARDGGSSAITSNNIWGQGTLVTVSSGGGGSGGGGSDVQLQESGPSLVKPSQSLSLTCTVTGYSITSDFAWNWIRQFPGNKLEWMGYISYSGNTRYNPSLKSRISITRDTSKNQFFLQLNSVTIEDTATYYCVTAGRGFPYWGQGTLVTVSAASTKGPSVFPLAPSSKSTSGGTAALGCLVKDYFPEPVTVSWNSGALTSGVHTFPAVLQSSGLYSLSSVVTVPSSSLGTQTYICNVNHKPSNTKVDKRVEPKSCDKTHTCPPCPAPEAAGAPSVFLFPPKPKDTLMISRTPEVTCVVVDVSHEDPEVKFNWYVDGVEVHNAKTKPREEQYNSTYRVVSVLTVLHQDWLNGKEYKCAVSNKALPAPIEKTISKAKGQPREPQVYTLPPSRDELTKNQVSLTCLVKGFYPSDIAVEWESNGQPENNYKTTPPVLDSDGSFFLYSKLTVDKSRWQQGNVFSCSVMHEALHNHYTQKSLSLSPGGGGGSGGGGSEVQLLESGGGLVQPGGSLRLSCAASGFSFSSGYDMCWVRQAPGKGLEWIACIAAGSAGITYDANWAKGRFTISRDNSKNTLYLQMNSLRAEDTAVYYCARSAFSFDYAMDLWGQGTLVTVSSGGGGSGGGGSGGGGSGGGGSDIQMTQSPSTLSASVGDRVTITCQASQSISSHLNWYQQKPGKAPKLLIYKASTLASGVPSRFSGSGSGTEFTLTISSLQPDDFATYYCQQGYSWGNVDNVFGGGTKVEIKGGGGSGGGGSQSLVESGGGLVQPGGSLRLSCAASGFSFSSNYWICWVRQAPGKGLEWIACIYVGSSGDTYYASSAKGRFTISRDNSKNTLYLQMNSLRAEDTAVYYCARDSSSYYMFNLWGQGTLVTVSSGGGGSGGGGSGGGGSGGGGSALVMTQSPSTLSASVGDRVTINCQASEDIDTYLAWYQQKPGKAPKLLIFYASDLASGVPSRFSGSGSGTEFTLTISSLQPDDFATYYCQGGYYTSSADTRGAFGGGTKVEIK

SEQ ID NO: 47 - DNA, 1419 bp, Artificial Sequence
  Synthesized
gacatcctgatgacccaatctccatcctccatgtctgtatctctgggagacacagtcagcatcacttgccattcaagtcaggacattaacagtaatatagggtggttgcagcagagaccagggaaatcatttaagggcctgatctatcatggaaccaacttggacgatgaagttccatcaaggttcagtggcagtggatctggagccgattattctctcaccatcagcagcctggaatctgaagattttgcagactattactgtgtacagtatgctcagtttccgtggacgttcggtggaggcaccaagctggaaatcaaacgtacggtggctgcaccatctgtcttcatcttcccgccatctgatgagcagttgaaatctggaactgcctctgttgtgtgcctgctgaataacttctatcccagagaggccaaagtacagtggaaggtggataacgccctccaatcgggtaactcccaggagagtgtcacagagcaggacagcaaggacagcacctacagcctcagcagcaccctgacgctgagcaaagcagactacgagaaacacaaagtctacgcctgcgaagtcacccatcagggcctgagctcgcccgtcacaaagagcttcaacaggggagagtgtggcggtggagggtccggcggtggtggatcccagtctgccctgactcagcctgcctccgtgtctgggtctcctggacagtcgatcaccatctcctgcactggaaccagcagtgacgttggtggttataactttgtctcctggtaccaacaacacccaggcaaagcccccaaactcatgatctatgatgtcagtgatcggccctcaggggtgtctgatcgcttctccggctccaagtctggcaacacggcctccctgatcatctctggcctccaggctgacgacgaggctgattattactgcagctcatatgggagcagcagcactcatgtgattttcggcggagggaccaaggtgaccgtcctaggtggaggcggttcaggcggaggtggttccggcggtggcggctccggtggaggcggctctcaggtgcaattgcaggagtcggggggaggcctggtcaagcctggagggtccctgagactctcctgtgcagcctctggattcacctttagtagttattggatgagctgggtccgccaggctccagggaaggggctggagtgggtggccaacataaaccgcgatggaagtgcgagttactatgtggactctgtgaagggccgattcaccatctccagagacgacgccaagaactcactgtatctgcaaatgaacagcctgagagctgaggacacggctgtgtattactgtgcgagagatcgtggggtgggctacttcgatctctggggccgtggcaccctggtcaccgtctcgagc

SEQ ID NO: 48 - protein, 473 aa, Artificial Sequence
  Synthesized
DILMTQSPSSMSVSLGDTVSITCHSSQDINSNIGWLQQRPGKSFKGLIYHGTNLDDEVPSRFSGSGSGADYSLTISSLESEDFADYYCVQYAQFPWTFGGGTKLEIKRTVAAPSVFIFPPSDEQLKSGTASVVCLLNNFYPREAKVQWKVDNALQSGNSQESVTEQDSKDSTYSLSSTLTLSKADYEKHKVYACEVTHQGLSSPVTKSFNRGECGGGGSGGGGSQSALTQPASVSGSPGQSITISCTGTSSDVGGYNFVSWYQQHPGKAPKLMIYDVSDRPSGVSDRFSGSKSGNTASLIISGLQADDEADYYCSSYGSSSTHVIFGGGTKVTVLGGGGSGGGGSGGGGSGGGGSQVQLQESGGGLVKPGGSLRLSCAASGFTFSSYWMSWVRQAPGKGLEWVANINRDGSASYYVDSVKGRFTISRDDAKNSLYLQMNSLRAEDTAVYYCARDRGVGYFDLWGRGTLVTVSS

SEQ ID NO: 49 - DNA, 3693 bp, Artificial Sequence
  Synthesized
gacgtcgtgatgacccagtctccttccaccctgtctgcatctgtaggagacagagtcaccatcaattgccaagccagtgagagcattagcagttggttagcctggtatcagcagaaaccagggaaagcccctaagctcctgatctatgaagcatccaaactggcatctggggtcccatcaaggttcagcggcagtggatctgggacagaatttactctcaccatcagcagcctgcagcctgatgattttgcaacttattactgccaaggctatttttattttattagtcgtacttatgtaaattctttcggcggagggaccaaggtggagatcaaaggcggtggcggtagtgggggaggcggttctggcggcggagggtccggcggtggaggatcagaggtgcagctggtggagtctgggggaggcttggtccagcctggggggtccctgagactctcctgtgcagcctctggattcaccatcagtaccaatgcaatgagctgggtccgccaggctccagggaaggggctggagtggatcggagtcattactggtcgtgatatcacatactacgcgagctgggcgaaaggcagattcaccatctccagagacaattccaagaacacgctgtatcttcaaatgaacagcctgagagccgaggacacggctgtgtattactgtgcgagagacggtggttcttctgctattactagtaacaacatttggggccagggaaccctggtcaccgtgtcgacaggcggtggagggtccggcggtggtggatcacaggtgcagctgcagcagcccggcgccgagctggtgaagcccggcgccagcgtgaagatgagctgcaaggccagcggctacaccttcaccagctacaacatgcactgggtgaagcagacccccggccggggcctggagtggatcggcgccatctaccccggcaacggcgacaccagctacaaccagaagttcaagggcaaggccaccctgaccgccgacaagagcagcagcaccgcctacatgcagctgagcagcctgaccagcgaggacagcgccgtgtactactgcgcccggagcacctactacggcggcgactggtacttcaacgtgtggggcgccggcaccaccgtgaccgtgagcgccgctagcaccaagggcccatcggtcttccccctggcaccctcctccaagagcacctctgggggcacagcggccctgggctgcctggtcaaggactacttccccgaaccggtgacggtgtcgtggaactcaggcgccctgaccagcggcgtgcacaccttcccggctgtcctacagtcctcaggactctactccctcagcagcgtggtgaccgtgccctccagcagcttgggcacccagacctacatctgcaacgtgaatcacaagcccagcaacaccaaggtggacaagagagttgagcccaaatcttgtgacaaaactcacacatgcccaccgtgcccagcacctgaagccgcgggggcaccgtcagtcttcctcttccccccaaaacccaaggacaccctcatgatctcccggacccctgaggtcacatgcgtggtggtggacgtgagccacgaagaccctgaggtcaagttcaactggtacgtggacggcgtggaggtgcataatgccaagacaaagccgcgggaggagcagtacaacagcacgtaccgtgtggtcagcgtcctcaccgtcctgcaccaggactggctgaatggcaaggagtacaagtgcgcggtctccaacaaagccctcccagcccccatcgagaaaaccatctccaaagccaaagggcagccccgagaaccacaggtgtacaccctgcccccatcccgggatgagctgaccaagaaccaggtcagcctgacctgcctggtcaaaggcttctatcccagcgacatcgccgtggagtgggagagcaatgggcagccggagaacaactacaagaccacgcctcccgtgctggactccgacggctccttcttcctctatagcaagctcaccgtggacaagagcaggtggcagcaggggaacgtcttctcatgctccgtgatgcatgaggctctgcacaaccactacacgcagaagagcctctccctgtctccgggtggcggtggagggtccggcggtggtggatccgaggtgcagctgttggagtctgggggaggcttggtacagcctggggggtccctgagactctcctgtgcagcctctggattctccttcagtagcgggtacgacatgtgctgggtccgccaggctccagggaaggggctggagtggatcgcatgcattgctgctggtagtgctggtatcacttacgacgcgaactgggcgaaaggccggttcaccatctccagagacaattccaagaacacgctgtatctgcaaatgaacagcctgagagccgaggacacggccgtatattactgtgcgagatcggcgttttcgttcgactacgccatggacctctggggccagggaaccctggtcaccgtctcgagcggtggaggcggatctggcggaggtggttccggcggtggcggctccggtggaggcggctctgacatccagatgacccagtctccttccaccctgtctgcatctgtaggagacagagtcaccatcacttgccaggccagtcagagcattagttcccacttaaactggtatcagcagaaaccagggaaagcccctaagctcctgatctataaggcatccactctggcatctggggtcccatcaaggttcagcggcagtggatctgggacagaatttactctcaccatcagcagcctgcagcctgatgattttgcaacttattactgccaacagggttatagttggggtaatgttgataatgttttcggcggagggaccaaggtggagatcaaaggcggtggagggtccggcggtggtggctccggacggtcgctggtggagtctgggggaggcttggtccagcctggggggtccctgagactctcctgtactgcctctggattcaccatcagtagctaccacatgcagtgggtccgccaggctccagggaaggggctggagtacatcggaaccattagtagtggtggtaatgtatactacgcaagctccgctagaggcagattcaccatctccagaccctcgtccaagaacacggtggatcttcaaatgaacagcctgagagccgaggacacggctgtgtattactgtgcgagagactctggttatagtgatcctatgtggggccagggaaccctggtcaccgtctcttcaggcggtggcggtagtgggggaggcggttctggcggcggagggtccggcggtggaggatcagacgttgtgatgacccagtctccatcttccgtgtctgcatctgtaggagacagagtcaccatcacctgtcaggccagtcagaacattaggacttacttatcctggtatcagcagaaaccagggaaagcccctaagctcctgatctatgctgcagccaatctggcatctggggtcccatcaaggttcagcggcagtggatctgggacagatttcactctcaccatcagcgacctggagcctggcgatgctgcaacttactattgtcagtctacctatcttggtactgattatgttggcggtgctttcggcggagggaccaaggtggagatcaaa

SEQ ID NO: 50 - protein, 1231 aa, Artificial Sequence
  Synthesized
DVVMTQSPSTLSASVGDRVTINCQASESISSWLAWYQQKPGKAPKLLIYEASKLASGVPSRFSGSGSGTEFTLTISSLQPDDFATYYCQGYFYFISRTYVNSFGGGTKVEIKGGGGSGGGGSGGGGSGGGGSEVQLVESGGGLVQPGGSLRLSCAASGFTISTNAMSWVRQAPGKGLEWIGVITGRDITYYASWAKGRFTISRDNSKNTLYLQMNSLRAEDTAVYYCARDGGSSAITSNNIWGQGTLVTVSTGGGGSGGGGSQVQLQQPGAELVKPGASVKMSCKASGYTFTSYNMHWVKQTPGRGLEWIGAIYPGNGDTSYNQKFKGKATLTADKSSSTAYMQLSSLTSEDSAVYYCARSTYYGGDWYFNVWGAGTTVTVSAASTKGPSVFPLAPSSKSTSGGTAALGCLVKDYFPEPVTVSWNSGALTSGVHTFPAVLQSSGLYSLSSVVTVPSSSLGTQTYICNVNHKPSNTKVDKRVEPKSCDKTHTCPPCPAPEAAGAPSVFLFPPKPKDTLMISRTPEVTCVVVDVSHEDPEVKFNWYVDGVEVHNAKTKPREEQYNSTYRVVSVLTVLHQDWLNGKEYKCAVSNKALPAPIEKTISKAKGQPREPQVYTLPPSRDELTKNQVSLTCLVKGFYPSDIAVEWESNGQPENNYKTTPPVLDSDGSFFLYSKLTVDKSRWQQGNVFSCSVMHEALHNHYTQKSLSLSPGGGGGSGGGGSEVQLLESGGGLVQPGGSLRLSCAASGFSFSSGYDMCWVRQAPGKGLEWIACIAAGSAGITYDANWAKGRFTISRDNSKNTLYLQMNSLRAEDTAVYYCARSAFSFDYAMDLWGQGTLVTVSSGGGGSGGGGSGGGGSGGGGSDIQMTQSPSTLSASVGDRVTITCQASQSISSHLNWYQQKPGKAPKLLIYKASTLASGVPSRFSGSGSGTEFTLTISSLQPDDFATYYCQQGYSWGNVDNVFGGGTKVEIKGGGGSGGGGSGRSLVESGGGLVQPGGSLRLSCTASGFTISSYHMQWVRQAPGKGLEYIGTISSGGNVYYASSARGRFTISRPSSKNTVDLQMNSLRAEDTAVYYCARDSGYSDPMWGQGTLVTVSSGGGGSGGGGSGGGGSGGGGSDVVMTQSPSSVSASVGDRVTITCQASQNIRTYLSWYQQKPGKAPKLLIYAAANLASGVPSRFSGSGSGTDFTLTISDLEPGDAATYYCQSTYLGTDYVGGAFGGGTKVEIK

SEQ ID NO: 51 - DNA, 1413 bp, Artificial Sequence
  Synthesized
cagatcgtgctgagccagagccccgccatcctgagcgccagccccggcgagaaggtgaccatgacctgccgggccagcagcagcgtgagctacatccactggttccagcagaagcccggcagcagccccaagccctggatctacgccaccagcaacctggccagcggcgtgcccgtgcggttcagcggcagcggcagcggcaccagctacagcctgaccatcagccgggtggaggccgaggacgccgccacctactactgccagcagtggaccagcaacccccccaccttcggcggcggcaccaagctggagatcaagcgtacggtggctgcaccatctgtcttcatcttcccgccatctgatgagcagttgaaatctggaactgcctctgttgtgtgcctgctgaataacttctatcccagagaggccaaagtacagtggaaggtggataacgccctccaatcgggtaactcccaggagagtgtcacagagcaggacagcaaggacagcacctacagcctcagcagcaccctgacgctgagcaaagcagactacgagaaacacaaagtctacgcctgcgaagtcacccatcagggcctgagctcgcccgtcacaaagagcttcaacaggggagagtgtggcggtggagggtccggcggtggtggatccgaggtgcagctggtgcagtctggagcagaggtgaagaaaccaggagagtctctgaagatctcctgtaagggttctggatacagctttagcagttcatggatcggctgggtgcgccaggcacctgggaaaggcctggaatggatggggatcatctatcctgatgactctgataccagatacagtccatccttccaaggccaggtcaccatctcagccgacaagtccatcaggactgcctacctgcagtggagtagcctgaaggcctcggacaccgctatgtattactgtgcgagacatgttactatgatttggggagttattattgacttctggggccagggaaccctggtcaccgtctcctcaggcggtggcggtagtgggggaggcggttctggcggcggagggtccggcggtggaggatcagccatccagttgacccagtctccatcctccctgtctgcatctgtaggagacagagtcaccatcacttgccgggcaagtcagggcattagcagtgctttagcctggtatcagcagaaaccagggaaagctcctaagctcctgatctatgatgcctccagtttggaaagtggggtcccatcaaggttcagcggcagtggatctgggacagatttcactctcaccatcagcagcctgcagcctgaagattttgcaacttattactgtcaacagtttaatagttacccattcactttcggccctgggaccaaagtggatatcaaa

SEQ ID NO: 52 - protein, 471 aa, Artificial Sequence
  Synthesized
QIVLSQSPAILSASPGEKVTMTCRASSSVSYIHWFQQKPGSSPKPWIYATSNLASGVPVRFSGSGSGTSYSLTISRVEAEDAATYYCQQWTSNPPTFGGGTKLEIKRTVAAPSVFIFPPSDEQLKSGTASVVCLLNNFYPREAKVQWKVDNALQSGNSQESVTEQDSKDSTYSLSSTLTLSKADYEKHKVYACEVTHQGLSSPVTKSFNRGECGGGGSGGGGSEVQLVQSGAEVKKPGESLKISCKGSGYSFSSSWIGWVRQAPGKGLEWMGIIYPDDSDTRYSPSFQGQVTISADKSIRTAYLQWSSLKASDTAMYYCARHVTMIWGVIIDFWGQGTLVTVSSGGGGSGGGGSGGGGSGGGGSAIQLTQSPSSLSASVGDRVTITCRASQGISSALAWYQQKPGKAPKLLIYDASSLESGVPSRFSGSGSGTDFTLTISSLQPEDFATYYCQQFNSYPFTFGPGTKVDIK

SEQ ID NO: 53 - DNA, 3693 bp, Artificial Sequence
  Synthesized
gacgtcgtgatgacccagtctccttccaccctgtctgcatctgtaggagacagagtcaccatcaattgccaagccagtgagagcattagcagttggttagcctggtatcagcagaaaccagggaaagcccctaagctcctgatctatgaagcatccaaactggcatctggggtcccatcaaggttcagcggcagtggatctgggacagaatttactctcaccatcagcagcctgcagcctgatgattttgcaacttattactgccaaggctatttttattttattagtcgtacttatgtaaattctttcggctgtgggaccaaggtggagatcaaaggtggaggcggttcaggcggaggtggaagtggtggtggcggctctggaggcggcggatctgaggtgcagctggtggagtctgggggaggcttggtccagcctggggggtccctgagactctcctgtgcagcctctggattcaccatcagtaccaatgcaatgagctgggtccgccaggctccagggaagtgcctggagtggatcggagtcattactggtcgtgatatcacatactacgcgagctgggcgaaaggcagattcaccatctccagagacaattccaagaacacgctgtatcttcaaatgaacagcctgagagccgaggacacggctgtgtattactgtgcgagagacggtggttcttctgctattactagtaacaacatttggggccagggaaccctggtcaccgtgtcgacaggcggtggagggtccggcggtggtggatcccaggtgcagctgcagcagcccggcgccgagctggtgaagcccggcgccagcgtgaagatgagctgcaaggccagcggctacaccttcaccagctacaacatgcactgggtgaagcagacccccggccggggcctggagtggatcggcgccatctaccccggcaacggcgacaccagctacaaccagaagttcaagggcaaggccaccctgaccgccgacaagagcagcagcaccgcctacatgcagctgagcagcctgaccagcgaggacagcgccgtgtactactgcgcccggagcacctactacggcggcgactggtacttcaacgtgtggggcgccggcaccaccgtgaccgtgagcgccgctagcaccaagggcccatcggtcttccccctggcaccctcctccaagagcacctctgggggcacagcggccctgggctgcctggtcaaggactacttccccgaaccggtgacggtgtcgtggaactcaggcgccctgaccagcggcgtgcacaccttcccggctgtcctacagtcctcaggactctactccctcagcagcgtggtgaccgtgccctccagcagcttgggcacccagacctacatctgcaacgtgaatcacaagcccagcaacaccaaggtggacaagagagttgagcccaaatcttgtgacaaaactcacacatgcccaccgtgcccagcacctgaagccgcggggggaccgtcagtcttcctcttccccccaaaacccaaggacaccctcatgatctcccggacccctgaggtcacatgcgtggtggtggacgtgagccacgaagaccctgaggtcaagttcaactggtacgtggacggcgtggaggtgcataatgccaagacaaagccgcgggaggagcagtacgccagcacgtaccgtgtggtcagcgtcctcaccgtcctgcaccaggactggctgaatggcaaggagtacaagtgcgcggtctccaacaaagccctcccagcccccatcgagaaaaccatctccaaagccaaagggcagccccgagaaccacaggtgtacaccctgcccccatcccgggatgagctgaccaagaaccaggtcagcctgacctgcctggtcaaaggcttctatcccagcgacatcgccgtggagtgggagagcaatgggcagccggagaacaactacaagaccacgcctcccgtgctggactccgacggctccttcttcctctatagcaagctcaccgtggacaagagcaggtggcagcaggggaacgtcttctcatgctccgtgatgcatgaggctctgcacaaccactacacgcagaagagcctctccctgtctccgggtggcggtggagggtccggcggtggtggatccgaggtgcagctgttggagtctgggggaggcttggtacagcctggggggtccctgagactctcctgtgcagcctctggattctccttcagtagcgggtacgacatgtgctgggtccgccaggctccagggaagtgcctggagtggatcgcatgcattgctgctggtagtgctggtatcacttacgacgcgaactgggcgaaaggccggttcaccatctccagagacaattccaagaacacgctgtatctgcaaatgaacagcctgagagccgaggacacggccgtatattactgtgcgagatcggcgttttcgttcgactacgccatggacctctggggccagggaaccctggtcaccgtctcgagcggtggaggcggttcaggcggaggtggaagtggtggtggcggctctggaggcggcggatctgacatccagatgacccagtctccttccaccctgtctgcatctgtaggagacagagtcaccatcacttgccaggccagtcagagcattagttcccacttaaactggtatcagcagaaaccagggaaagcccctaagctcctgatctataaggcatccactctggcatctggggtcccatcaaggttcagcggcagtggatctgggacagaatttactctcaccatcagcagcctgcagcctgatgattttgcaacttattactgccaacagggttatagttggggtaatgttgataatgttttcggctgcgggaccaaggtggagatcaaaggtggtggcggctctggaggaggagggtccggacggtcgctggtggagtctgggggaggcttggtccagcctggggggtccctgagactctcctgtactgcctctggattcaccatcagtagctaccacatgcagtgggtccggcaggcacctgggaagtgcctggagtacatcggaaccattagtagtggtggtaatgtatactacgcaagctccgctagaggcagattcaccatctccagaccctcgtccaagaacacggtggatcttcaaatgaacagcctgagagccgaggacacggctgtgtattactgtgcgagagactctggttatagtgatcctatgtggggccagggaaccctggtcaccgtctcttcaggcggtggcggtagtgggggaggcggttctggcggcggagggtccggcggtggaggatcagacgttgtgatgacccagtctccatcttccgtgtctgcatctgtaggagacagagtcaccatcacctgtcaggccagtcagaacattaggacttacttatcctggtatcagcagaaaccagggaaagcccctaagctcctgatctatgctgcagccaatctggcatctggggtcccatcaaggttcagcggcagtggatctgggacagatttcactctcaccatcagcgacttggaacctggcgatgctgcaacttactattgtcagtctacctatcttggtactgattatgttggcggtgctttcggctgtgggaccaaggtggagatcaaa

SEQ ID NO: 54 - protein, 1231 aa, Artificial Sequence
  Synthesized
DVVMTQSPSTLSASVGDRVTINCQASESISSWLAWYQQKPGKAPKLLIYEASKLASGVPSRFSGSGSGTEFTLTISSLQPDDFATYYCQGYFYFISRTYVNSFGCGTKVEIKGGGGSGGGGSGGGGSGGGGSEVQLVESGGGLVQPGGSLRLSCAASGFTISTNAMSWVRQAPGKCLEWIGVITGRDITYYASWAKGRFTISRDNSKNTLYLQMNSLRAEDTAVYYCARDGGSSAITSNNIWGQGTLVTVSTGGGGSGGGGSQVQLQQPGAELVKPGASVKMSCKASGYTFTSYNMHWVKQTPGRGLEWIGAIYPGNGDTSYNQKFKGKATLTADKSSSTAYMQLSSLTSEDSAVYYCARSTYYGGDWYFNVWGAGTTVTVSAASTKGPSVFPLAPSSKSTSGGTAALGCLVKDYFPEPVTVSWNSGALTSGVHTFPAVLQSSGLYSLSSVVTVPSSSLGTQTYICNVNHKPSNTKVDKRVEPKSCDKTHTCPPCPAPEAAGGPSVFLFPPKPKDTLMISRTPEVTCVVVDVSHEDPEVKFNWYVDGVEVHNAKTKPREEQYASTYRVVSVLTVLHQDWLNGKEYKCAVSNKALPAPIEKTISKAKGQPREPQVYTLPPSRDELTKNQVSLTCLVKGFYPSDIAVEWESNGQPENNYKTTPPVLDSDGSFFLYSKLTVDKSRWQQGNVFSCSVMHEALHNHYTQKSLSLSPGGGGGSGGGGSEVQLLESGGGLVQPGGSLRLSCAASGFSFSSGYDMCWVRQAPGKCLEWIACIAAGSAGITYDANWAKGRFTISRDNSKNTLYLQMNSLRAEDTAVYYCARSAFSFDYAMDLWGQGTLVTVSSGGGGSGGGGSGGGGSGGGGSDIQMTQSPSTLSASVGDRVTITCQASQSISSHLNWYQQKPGKAPKLLIYKASTLASGVPSRFSGSGSGTEFTLTISSLQPDDFATYYCQQGYSWGNVDNVFGCGTKVEIKGGGGSGGGGSGRSLVESGGGLVQPGGSLRLSCTASGFTISSYHMQWVRQAPGKCLEYIGTISSGGNVYYASSARGRFTISRPSSKNTVDLQMNSLRAEDTAVYYCARDSGYSDPMWGQGTLVTVSSGGGGSGGGGSGGGGSGGGGSDVVMTQSPSSVSASVGDRVTITCQASQNIRTYLSWYQQKPGKAPKLLIYAAANLASGVPSRFSGSGSGTDFTLTISDLEPGDAATYYCQSTYLGTDYVGGAFGCGTKVEIK

SEQ ID NO: 55 - DNA, 1413 bp, Artificial Sequence
  Synthesized
cagatcgtgctgagccagagccccgccatcctgagcgccagccccggcgagaaggtgaccatgacctgccgggccagcagcagcgtgagctacatccactggttccagcagaagcccggcagcagccccaagccctggatctacgccaccagcaacctggccagcggcgtgcccgtgcggttcagcggcagcggcagcggcaccagctacagcctgaccatcagccgggtggaggccgaggacgccgccacctactactgccagcagtggaccagcaacccccccaccttcggcggcggcaccaagctggagatcaagcgtacggtggctgcaccatctgtcttcatcttcccgccatctgatgagcagttgaaatctggaactgcctctgttgtgtgcctgctgaataacttctatcccagagaggccaaagtacagtggaaggtggataacgccctccaatcgggtaactcccaggagagtgtcacagagcaggacagcaaggacagcacctacagcctcagcagcaccctgacgctgagcaaagcagactacgagaaacacaaagtctacgcctgcgaagtcacccatcagggcctgagctcgcccgtcacaaagagcttcaacaggggagagtgtggcggtggagggtccggcggtggtggatccgaggtgcagctggtgcagtctggagcagaggtgaagaaaccaggagagtctctgaagatctcctgtaagggttctggatacagctttagcagttcatggatcggctgggtgcgccaggcacctgggaaatgtctggaatggatggggatcatctatcctgatgactctgataccagatacagtccatccttccaaggccaggtcaccatctcagccgacaagtccatcaggactgcctacctgcagtggagtagcctgaaggcctcggacaccgctatgtattactgtgcgagacatgttactatgatttggggagttattattgacttctggggccagggaaccctggtcaccgtctcctcaggcggtggcggtagtgggggaggcggttctggcggcggagggtccggcggtggaggatcagccatccagttgacccagtctccatcctccctgtctgcatctgtaggagacagagtcaccatcacttgccgggcaagtcagggcattagcagtgctttagcctggtatcagcagaaaccagggaaagctcctaagctcctgatctatgatgcctccagtttggaaagtggggtcccatcaaggttcagcggcagtggatctgggacagatttcactctcaccatcagcagcctgcagcctgaagattttgcaacttattactgtcaacagtttaatagttacccattcactttcggctgtgggaccaaagtggatatcaaa

SEQ ID NO: 56 - protein, 471 aa, Artificial Sequence
  Synthesized
QIVLSQSPAILSASPGEKVTMTCRASSSVSYIHWFQQKPGSSPKPWIYATSNLASGVPVRFSGSGSGTSYSLTISRVEAEDAATYYCQQWTSNPPTFGGGTKLEIKRTVAAPSVFIFPPSDEQLKSGTASVVCLLNNFYPREAKVQWKVDNALQSGNSQESVTEQDSKDSTYSLSSTLTLSKADYEKHKVYACEVTHQGLSSPVTKSFNRGECGGGGSGGGGSEVQLVQSGAEVKKPGESLKISCKGSGYSFSSSWIGWVRQAPGKCLEWMGIIYPDDSDTRYSPSFQGQVTISADKSIRTAYLQWSSLKASDTAMYYCARHVTMIWGVIIDFWGQGTLVTVSSGGGGSGGGGSGGGGSGGGGSAIQLTQSPSSLSASVGDRVTITCRASQGISSALAWYQQKPGKAPKLLIYDASSLESGVPSRFSGSGSGTDFTLTISSLQPEDFATYYCQQFNSYPFTFGCGTKVDIK

SEQ ID NO: 57 - DNA, 3690 bp, Artificial Sequence
  Synthesized
gagatcgtgatgacccagagccccagcaccctgagcgccagcgtgggcgacagggtgatcatcacctgccaggccagcgagagcatcagcagctggctggcctggtaccagcagaagcccggcaaggcccccaagctgctgatctacgaggccagcaagctggccagcggcgtgcccagcaggttcagcggcagcggcagcggcgccgagttcaccctgaccatcagcagcctgcagcccgacgacttcgccacctactactgccagggctacttctacttcatcagcaggacctacgtgaacagcttcggctgcggcaccaagctgaccgtgctgggcggtggcggtagtgggggaggcggttctggcggcggagggtccggcggtggaggatcagaggtgcagctggtggagagcggcggcggcctggtgcagcccggcggcagcctgaggctgagctgcaccgccagcggcttcaccatcagcaccaacgccatgagctgggtgaggcaggcccccggcaagtgcctggagtgggtgggcgtgatcaccggcagggacatcacctactacgccagctgggccaagggcaggttcaccatcagcagggacaccagcaagaacaccgtgtacctgcagatgaacagcctgagggccgaggacaccgccgtgtactactgcgccagggacggcggcagcagcgccatcaccagcaacaacatctggggccagggcaccctggtgaccgtgtcgacaggcggtggagggtccggcggtggtggatcacaggtacaactgcagcagtctgggcctgagctggagaagcctggcgcttcagtgaagatatcctgcaaggcttctggttactcattcactggctacaccatgaactgggtgaagcagagccatggaaagagccttgagtggattggacttattactccttacaatggtgcttctagctacaaccagaagttcaggggcaaggccacattaactgtagacaagtcatccagcacagcctacatggacctcctcagtctgacatctgaagactctgcagtctatttctgtgcaagggggggttacgacgggaggggttttgactactggggatccgggaccccggtcaccgtctcctcagctagcaccaagggcccatcggtcttccccctggcaccctcctccaagagcacctctgggggcacagcggccctgggctgcctggtcaaggactacttccccgaaccggtgacggtgtcgtggaactcaggcgccctgaccagcggcgtgcacaccttcccggctgtcctacagtcctcaggactctactccctcagcagcgtggtgaccgtgccctccagcagcttgggcacccagacctacatctgcaacgtgaatcacaagcccagcaacaccaaggtggacaagagagttgagcccaaatcttgtgacaaaactcacacatgcccaccgtgcccagcacctgaagccgcggggggaccgtcagtcttcctcttccccccaaaacccaaggacaccctcatgatctcccggacccctgaggtcacatgcgtggtggtggacgtgagccacgaagaccctgaggtcaagttcaactggtacgtggacggcgtggaggtgcataatgccaagacaaagccgcgggaggagcagtacgccagcacgtaccgtgtggtcagcgtcctcaccgtcctgcaccaggactggctgaatggcaaggagtacaagtgcgcggtctccaacaaagccctcccagcccccatcgagaaaaccatctccaaagccaaagggcagccccgagaaccacaggtgtacaccctgcccccatcccgggatgagctgaccaagaaccaggtcagcctgacctgcctggtcaaaggcttctatcccagcgacatcgccgtggagtgggagagcaatgggcagccggagaacaactacaagaccacgcctcccgtgctggactccgacggctccttcttcctctatagcaagctcaccgtggacaagagcaggtggcagcaggggaacgtcttctcatgctccgtgatgcatgaggctctgcacaaccactacacgcagaagagcctctccctgtctccgggtggcggtggagggtccggcggtggtggatccgaggtgcagctgttggagtctgggggaggcttggtacagcctggggggtccctgagactctcctgtgcagcctctggattctccttcagtagcgggtacgacatgtgctgggtccgccaggctccagggaagtgcctggagtggatcgcatgcattgctgctggtagtgctggtatcacttacgacgcgaactgggcgaaaggccggttcaccatctccagagacaattccaagaacacgctgtatctgcaaatgaacagcctgagagccgaggacacggccgtatattactgtgcgagatcggcgttttcgttcgactacgccatggacctctggggccagggaaccctggtcaccgtctcgagcggtggaggcggttcaggcggaggtggaagtggtggtggcggctctggaggcggcggatctgacatccagatgacccagtctccttccaccctgtctgcatctgtaggagacagagtcaccatcacttgccaggccagtcagagcattagttcccacttaaactggtatcagcagaaaccagggaaagcccctaagctcctgatctataaggcatccactctggcatctggggtcccatcaaggttcagcggcagtggatctgggacagaatttactctcaccatcagcagcctgcagcctgatgattttgcaacttattactgccaacagggttatagttggggtaatgttgataatgttttcggctgcgggaccaaggtggagatcaaaggtggtggcggctctggaggaggagggtccggacggtcgctggtggagtctgggggaggcttggtccagcctggggggtccctgagactctcctgtactgcctctggattcaccatcagtagctaccacatgcagtgggtccggcaggcacctgggaagtgcctggagtacatcggaaccattagtagtggtggtaatgtatactacgcaagctccgctagaggcagattcaccatctccagaccctcgtccaagaacacggtggatcttcaaatgaacagcctgagagccgaggacacggctgtgtattactgtgcgagagactctggttatagtgatcctatgtggggccagggaaccctggtcaccgtctcttcaggcggtggcggtagtgggggaggcggttctggcggcggagggtccggcggtggaggatcagacgttgtgatgacccagtctccatcttccgtgtctgcatctgtaggagacagagtcaccatcacctgtcaggccagtcagaacattaggacttacttatcctggtatcagcagaaaccagggaaagcccctaagctcctgatctatgctgcagccaatctggcatctggggtcccatcaaggttcagcggcagtggatctgggacagatttcactctcaccatcagcgacttggaacctggcgatgctgcaacttactattgtcagtctacctatcttggtactgattatgttggcggtgctttcggctgtgggaccaaggtggagatcaaatga

SEQ ID NO: 58 - protein, 1229 aa, Artificial Sequence
  Synthesized
EIVMTQSPSTLSASVGDRVIITCQASESISSWLAWYQQKPGKAPKLLIYEASKLASGVPSRFSGSGSGAEFTLTISSLQPDDFATYYCQGYFYFISRTYVNSFGCGTKLTVLGGGGSGGGGSGGGGSGGGGSEVQLVESGGGLVQPGGSLRLSCTASGFTISTNAMSWVRQAPGKCLEWVGVITGRDITYYASWAKGRFTISRDTSKNTVYLQMNSLRAEDTAVYYCARDGGSSAITSNNIWGQGTLVTVSTGGGGSGGGGSQVQLQQSGPELEKPGASVKISCKASGYSFTGYTMNWVKQSHGKSLEWIGLITPYNGASSYNQKFRGKATLTVDKSSSTAYMDLLSLTSEDSAVYFCARGGYDGRGFDYWGSGTPVTVSSASTKGPSVFPLAPSSKSTSGGTAALGCLVKDYFPEPVTVSWNSGALTSGVHTFPAVLQSSGLYSLSSVVTVPSSSLGTQTYICNVNHKPSNTKVDKRVEPKSCDKTHTCPPCPAPEAAGGPSVFLFPPKPKDTLMISRTPEVTCVVVDVSHEDPEVKFNWYVDGVEVHNAKTKPREEQYASTYRVVSVLTVLHQDWLNGKEYKCAVSNKALPAPIEKTISKAKGQPREPQVYTLPPSRDELTKNQVSLTCLVKGFYPSDIAVEWESNGQPENNYKTTPPVLDSDGSFFLYSKLTVDKSRWQQGNVFSCSVMHEALHNHYTQKSLSLSPGGGGGSGGGGSEVQLLESGGGLVQPGGSLRLSCAASGFSFSSGYDMCWVRQAPGKCLEWIACIAAGSAGITYDANWAKGRFTISRDNSKNTLYLQMNSLRAEDTAVYYCARSAFSFDYAMDLWGQGTLVTVSSGGGGSGGGGSGGGGSGGGGSDIQMTQSPSTLSASVGDRVTITCQASQSISSHLNWYQQKPGKAPKLLIYKASTLASGVPSRFSGSGSGTEFTLTISSLQPDDFATYYCQQGYSWGNVDNVFGCGTKVEIKGGGGSGGGGSGRSLVESGGGLVQPGGSLRLSCTASGFTISSYHMQWVRQAPGKCLEYIGTISSGGNVYYASSARGRFTISRPSSKNTVDLQMNSLRAEDTAVYYCARDSGYSDPMWGQGTLVTVSSGGGGSGGGGSGGGGSGGGGSDVVMTQSPSSVSASVGDRVTITCQASQNIRTYLSWYQQKPGKAPKLLIYAAANLASGVPSRFSGSGSGTDFTLTISDLEPGDAATYYCQSTYLGTDYVGGAFGCGTKVEIK

SEQ ID NO: 59 - DNA, 1566 bp, Artificial Sequence
  Synthesized
gacatcgagctcactcagtctccagcaatcatgtctgcatctccaggggagaaggtcaccatgacctgcagtgccagctcaagtgtaagttacatgcactggtaccagcagaagtcaggcacctcccccaaaagatggatttatgacacatccaaactggcttctggagtcccaggtcgcttcagtggcagtgggtctggaaactcttactctctcacaatcagcagcgtggaggctgaagatgatgcaacttattactgccagcagtggagtaagcaccctctcacgttcggatccgggaccaaggtggaaatcaaacgtacggtggctgcaccatctgtcttcatcttcccgccatctgatgagcagttgaaatctggaactgcctctgttgtgtgcctgctgaataacttctatcccagagaggccaaagtacagtggaaggtggataacgccctccaatcgggtaactcccaggagagtgtcacagagcaggacagcaaggacagcacctacagcctcagcagcaccctgacgctgagcaaagcagactacgagaaacacaaagtctacgcctgcgaagtcacccatcagggcctgagctcgcccgtcacaaagagcttcaacaggggagagtgtggcggtggagggtccggcggtggtggatcctttcttaattcccttttcaaccaagaggttcagatccccttgactgaaagctattgcggcccttgtccgaaaaactggatatgttacaagaataattgttaccaattcttcgacgaaagcaagaactggtatgagagtcaggcgtcttgtatgagtcagaatgccagcctgcttaaggtttattcaaaagaagaccaggatctgcttaagttggtaaagagctaccactggatggggctggtacatatcccaacgaatgggtcatggcagtgggaggacggttctattctgagtccaaatctcctgacgatcatcgaaatgcagaaaggggactgtgccctgtatgcatcatccttcaaggggtacatcgagaactgcagtaccccaaatacctacatttgtatgcaaagaacggttggaggcggtggctcaggcggaggcggctcaggaggtggcggttcaggaggcggcggatctttcctaaactcattattcaaccaagaagttcaaattcccttgaccgaaagttactgtggcccatgtcctaaaaactggatatgttacaaaaataactgctaccaattttttgatgagagtaaaaactggtatgagagccaggcttcttgtatgtctcaaaatgccagccttctgaaagtatacagcaaagaggaccaggatttacttaaactggtgaagtcatatcattggatgggactagtacacattccaacaaatggatcttggcagtgggaagatggctccattctctcacccaacctactaacaataattgaaatgcagaagggagactgtgcactctatgcctcgagctttaaaggctatatagaaaactgttcaactccaaatacgtacatctgcatgcaaaggactgtgtag

SEQ ID NO: 60 - protein, 521 aa, Artificial Sequence
  Synthesized
DIELTQSPAIMSASPGEKVTMTCSASSSVSYMHWYQQKSGTSPKRWIYDTSKLASGVPGRFSGSGSGNSYSLTISSVEAEDDATYYCQQWSKHPLTFGSGTKVEIKRTVAAPSVFIFPPSDEQLKSGTASVVCLLNNFYPREAKVQWKVDNALQSGNSQESVTEQDSKDSTYSLSSTLTLSKADYEKHKVYACEVTHQGLSSPVTKSFNRGECGGGGSGGGGSFLNSLFNQEVQIPLTESYCGPCPKNWICYKNNCYQFFDESKNWYESQASCMSQNASLLKVYSKEDQDLLKLVKSYHWMGLVHIPTNGSWQWEDGSILSPNLLTIIEMQKGDCALYASSFKGYIENCSTPNTYICMQRTVGGGGSGGGGSGGGGSGGGGSFLNSLFNQEVQIPLTESYCGPCPKNWICYKNNCYQFFDESKNWYESQASCMSQNASLLKVYSKEDQDLLKLVKSYHWMGLVHIPTNGSWQWEDGSILSPNLLTIIEMQKGDCALYASSFKGYIENCSTPNTYICMQRTV

SEQ ID NO: 61 - DNA, 3687 bp, Artificial Sequence
  Synthesized
gagatcgtgatgacccagagccccagcaccctgagcgccagcgtgggcgacagggtgatcatcacctgccaggccagcgagagcatcagcagctggctggcctggtaccagcagaagcccggcaaggcccccaagctgctgatctacgaggccagcaagctggccagcggcgtgcccagcaggttcagcggcagcggcagcggcgccgagttcaccctgaccatcagcagcctgcagcccgacgacttcgccacctactactgccagggctacttctacttcatcagcaggacctacgtgaacagcttcggctgcggcaccaagctgaccgtgctgggcggtggcggtagtgggggaggcggttctggcggcggagggtccggcggtggaggatcagaggtgcagctggtggagagcggcggcggcctggtgcagcccggcggcagcctgaggctgagctgcaccgccagcggcttcaccatcagcaccaacgccatgagctgggtgaggcaggcccccggcaagtgcctggagtgggtgggcgtgatcaccggcagggacatcacctactacgccagctgggccaagggcaggttcaccatcagcagggacaccagcaagaacaccgtgtacctgcagatgaacagcctgagggccgaggacaccgccgtgtactactgcgccagggacggcggcagcagcgccatcaccagcaacaacatctggggccagggcaccctggtgaccgtgtcgacaggcggtggagggtccggcggtggtggatcacaggtccaactgcagcagcctggggctgagctggtgaggcctggggcttcagtgaagctgtcctgcaaggcttctggctacaccttcaccagctactggataaactgggtgaagcagaggcctggacaaggccttgagtggatcggaaatatttatccttctgatagttatactaactacaatcaaaagttcaaggacaaggccacattgactgtagacaaatcctccagcacagcctacatgcagctcagcagcccgacatctgaggactctgcggtctattactgtacaagatcgtggaggggtaactcctttgactactggggccaaggcaccactctcacagtctcctcagctagcaccaagggcccatcggtcttccccctggcaccctcctccaagagcacctctgggggcacagcggccctgggctgcctggtcaaggactacttccccgaaccggtgacggtgtcgtggaactcaggcgccctgaccagcggcgtgcacaccttcccggctgtcctacagtcctcaggactctactccctcagcagcgtggtgaccgtgccctccagcagcttgggcacccagacctacatctgcaacgtgaatcacaagcccagcaacaccaaggtggacaagagagttgagcccaaatcttgtgacaaaactcacacatgcccaccgtgcccagcacctgaagccgcggggggaccgtcagtcttcctcttccccccaaaacccaaggacaccctcatgatctcccggacccctgaggtcacatgcgtggtggtggacgtgagccacgaagaccctgaggtcaagttcaactggtacgtggacggcgtggaggtgcataatgccaagacaaagccgcgggaggagcagtacgccagcacgtaccgtgtggtcagcgtcctcaccgtcctgcaccaggactggctgaatggcaaggagtacaagtgcgcggtctccaacaaagccctcccagcccccatcgagaaaaccatctccaaagccaaagggcagccccgagaaccacaggtgtacaccctgcccccatcccgggatgagctgaccaagaaccaggtcagcctgacctgcctggtcaaaggcttctatcccagcgacatcgccgtggagtgggagagcaatgggcagccggagaacaactacaagaccacgcctcccgtgctggactccgacggctccttcttcctctatagcaagctcaccgtggacaagagcaggtggcagcaggggaacgtcttctcatgctccgtgatgcatgaggctctgcacaaccactacacgcagaagagcctctccctgtctccgggtggcggtggagggtccggcggtggtggatccgaggtgcagctgttggagtctgggggaggcttggtacagcctggggggtccctgagactctcctgtgcagcctctggattctccttcagtagcgggtacgacatgtgctgggtccgccaggctccagggaagtgcctggagtggatcgcatgcattgctgctggtagtgctggtatcacttacgacgcgaactgggcgaaaggccggttcaccatctccagagacaattccaagaacacgctgtatctgcaaatgaacagcctgagagccgaggacacggccgtatattactgtgcgagatcggcgttttcgttcgactacgccatggacctctggggccagggaaccctggtcaccgtctcgagcggtggaggcggttcaggcggaggtggaagtggtggtggcggctctggaggcggcggatctgacatccagatgacccagtctccttccaccctgtctgcatctgtaggagacagagtcaccatcacttgccaggccagtcagagcattagttcccacttaaactggtatcagcagaaaccagggaaagcccctaagctcctgatctataaggcatccactctggcatctggggtcccatcaaggttcagcggcagtggatctgggacagaatttactctcaccatcagcagcctgcagcctgatgattttgcaacttattactgccaacagggttatagttggggtaatgttgataatgttttcggctgcgggaccaaggtggagatcaaaggtggtggcggctctggaggaggagggtccggacggtcgctggtggagtctgggggaggcttggtccagcctggggggtccctgagactctcctgtactgcctctggattcaccatcagtagctaccacatgcagtgggtccggcaggcacctgggaagtgcctggagtacatcggaaccattagtagtggtggtaatgtatactacgcaagctccgctagaggcagattcaccatctccagaccctcgtccaagaacacggtggatcttcaaatgaacagcctgagagccgaggacacggctgtgtattactgtgcgagagactctggttatagtgatcctatgtggggccagggaaccctggtcaccgtctcttcaggcggtggcggtagtgggggaggcggttctggcggcggagggtccggcggtggaggatcagacgttgtgatgacccagtctccatcttccgtgtctgcatctgtaggagacagagtcaccatcacctgtcaggccagtcagaacattaggacttacttatcctggtatcagcagaaaccagggaaagcccctaagctcctgatctatgctgcagccaatctggcatctggggtcccatcaaggttcagcggcagtggatctgggacagatttcactctcaccatcagcgacttggaacctggcgatgctgcaacttactattgtcagtctacctatcttggtactgattatgttggcggtgctttcggctgtgggaccaaggtggagatcaaatga

SEQ ID NO: 62 - protein, 1228 aa, Artificial Sequence
  Synthesized
EIVMTQSPSTLSASVGDRVIITCQASESISSWLAWYQQKPGKAPKLLIYEASKLASGVPSRFSGSGSGAEFTLTISSLQPDDFATYYCQGYFYFISRTYVNSFGCGTKLTVLGGGGSGGGGSGGGGSGGGGSEVQLVESGGGLVQPGGSLRLSCTASGFTISTNAMSWVRQAPGKCLEWVGVITGRDITYYASWAKGRFTISRDTSKNTVYLQMNSLRAEDTAVYYCARDGGSSAITSNNIWGQGTLVTVSTGGGGSGGGGSQVQLQQPGAELVRPGASVKLSCKASGYTFTSYWINWVKQRPGQGLEWIGNIYPSDSYTNYNQKFKDKATLTVDKSSSTAYMQLSSPTSEDSAVYYCTRSWRGNSFDYWGQGTTLTVSSASTKGPSVFPLAPSSKSTSGGTAALGCLVKDYFPEPVTVSWNSGALTSGVHTFPAVLQSSGLYSLSSVVTVPSSSLGTQTYICNVNHKPSNTKVDKRVEPKSCDKTHTCPPCPAPEAAGGPSVFLFPPKPKDTLMISRTPEVTCVVVDVSHEDPEVKFNWYVDGVEVHNAKTKPREEQYASTYRVVSVLTVLHQDWLNGKEYKCAVSNKALPAPIEKTISKAKGQPREPQVYTLPPSRDELTKNQVSLTCLVKGFYPSDIAVEWESNGQPENNYKTTPPVLDSDGSFFLYSKLTVDKSRWQQGNVFSCSVMHEALHNHYTQKSLSLSPGGGGGSGGGGSEVQLLESGGGLVQPGGSLRLSCAASGFSFSSGYDMCWVRQAPGKCLEWIACIAAGSAGITYDANWAKGRFTISRDNSKNTLYLQMNSLRAEDTAVYYCARSAFSFDYAMDLWGQGTLVTVSSGGGGSGGGGSGGGGSGGGGSDIQMTQSPSTLSASVGDRVTITCQASQSISSHLNWYQQKPGKAPKLLIYKASTLASGVPSRFSGSGSGTEFTLTISSLQPDDFATYYCQQGYSWGNVDNVFGCGTKVEIKGGGGSGGGGSGRSLVESGGGLVQPGGSLRLSCTASGFTISSYHMQWVRQAPGKCLEYIGTISSGGNVYYASSARGRFTISRPSSKNTVDLQMNSLRAEDTAVYYCARDSGYSDPMWGQGTLVTVSSGGGGSGGGGSGGGGSGGGGSDVVMTQSPSSVSASVGDRVTITCQASQNIRTYLSWYQQKPGKAPKLLIYAAANLASGVPSRFSGSGSGTDFTLTISDLEPGDAATYYCQSTYLGTDYVGGAFGCGTKVEIK

SEQ ID NO: 63 - DNA, 1587 bp, Artificial Sequence
  Synthesized
gacattgtgatgacacagtctccatcctccctgactgtgacagcaggagagaaggtcactatgagctgcaagtccagtcagagtctgttaaacagtggaaatcaaaagaactacttgacctggtaccagcagaaaccagggcagcctcctaaactgttgatctactgggcatccactagggaatctggggtccctgatcgcttcacaggcagtggatctggaacagatttcactctcaccatcagcagtgtgcaggctgaagacctggcagtttattactgtcagaatgattatagttatccattcacgttcggctcggggacaaagttggaaataaaacgtacggtggctgcaccatctgtcttcatcttcccgccatctgatgagcagttgaaatctggaactgcctctgttgtgtgcctgctgaataacttctatcccagagaggccaaagtacagtggaaggtggataacgccctccaatcgggtaactcccaggagagtgtcacagagcaggacagcaaggacagcacctacagcctcagcagcaccctgacgctgagcaaagcagactacgagaaacacaaagtctacgcctgcgaagtcacccatcagggcctgagctcgcccgtcacaaagagcttcaacaggggagagtgtggcggtggagggtccggcggtggtggatcctttcttaattcccttttcaaccaagaggttcagatccccttgactgaaagctattgcggcccttgtccgaaaaactggatatgttacaagaataattgttaccaattcttcgacgaaagcaagaactggtatgagagtcaggcgtcttgtatgagtcagaatgccagcctgcttaaggtttattcaaaagaagaccaggatctgcttaagttggtaaagagctaccactggatggggctggtacatatcccaacgaatgggtcatggcagtgggaggacggttctattctgagtccaaatctcctgacgatcatcgaaatgcagaaaggggactgtgccctgtatgcatcatccttcaaggggtacatcgagaactgcagtaccccaaatacctacatttgtatgcaaagaacggttggaggcggtggctcaggcggaggcggctcaggaggtggcggttcaggaggcggcggatctttcctaaactcattattcaaccaagaagttcaaattcccttgaccgaaagttactgtggcccatgtcctaaaaactggatatgttacaaaaataactgctaccaattttttgatgagagtaaaaactggtatgagagccaggcttcttgtatgtctcaaaatgccagccttctgaaagtatacagcaaagaggaccaggatttacttaaactggtgaagtcatatcattggatgggactagtacacattccaacaaatggatcttggcagtgggaagatggctccattctctcacccaacctactaacaataattgaaatgcagaagggagactgtgcactctatgcctcgagctttaaaggctatatagaaaactgttcaactccaaatacgtacatctgcatgcaaaggactgtgtag

SEQ ID NO: 64 - protein, 527 aa, Artificial Sequence
  Synthesized
DIVMTQSPSSLTVTAGEKVTMSCKSSQSLLNSGNQKNYLTWYQQKPGQPPKLLIYWASTRESGVPDRFTGSGSGTDFTLTISSVQAEDLAVYYCQNDYSYPFTFGSGTKLEIKRTVAAPSVFIFPPSDEQLKSGTASVVCLLNNFYPREAKVQWKVDNALQSGNSQESVTEQDSKDSTYSLSSTLTLSKADYEKHKVYACEVTHQGLSSPVTKSFNRGECGGGGSGGGGSFLNSLFNQEVQIPLTESYCGPCPKNWICYKNNCYQFFDESKNWYESQASCMSQNASLLKVYSKEDQDLLKLVKSYHWMGLVHIPTNGSWQWEDGSILSPNLLTIIEMQKGDCALYASSFKGYIENCSTPNTYICMQRTVGGGGSGGGGSGGGGSGGGGSFLNSLFNQEVQIPLTESYCGPCPKNWICYKNNCYQFFDESKNWYESQASCMSQNASLLKVYSKEDQDLLKLVKSYHWMGLVHIPTNGSWQWEDGSILSPNLLTIIEMQKGDCALYASSFKGYIENCSTPNTYICMQRT

SEQ ID NO: 65 - DNA, 3693 bp, Artificial Sequence
  Synthesized
gagatcgtgatgacccagagccccagcaccctgagcgccagcgtgggcgacagggtgatcatcacctgccaggccagcgagagcatcagcagctggctggcctggtaccagcagaagcccggcaaggcccccaagctgctgatctacgaggccagcaagctggccagcggcgtgcccagcaggttcagcggcagcggcagcggcgccgagttcaccctgaccatcagcagcctgcagcccgacgacttcgccacctactactgccagggctacttctacttcatcagcaggacctacgtgaacagcttcggctgcggcaccaagctgaccgtgctgggcggtggcggtagtgggggaggcggttctggcggcggagggtccggcggtggaggatcagaggtgcagctggtggagagcggcggcggcctggtgcagcccggcggcagcctgaggctgagctgcaccgccagcggcttcaccatcagcaccaacgccatgagctgggtgaggcaggcccccggcaagtgcctggagtgggtgggcgtgatcaccggcagggacatcacctactacgccagctgggccaagggcaggttcaccatcagcagggacaccagcaagaacaccgtgtacctgcagatgaacagcctgagggccgaggacaccgccgtgtactactgcgccagggacggcggcagcagcgccatcaccagcaacaacatctggggccagggcaccctggtgaccgtgtcgacaggcggtggagggtccggcggtggtggatcagaggttcagctggtggagtctggcggtggcctggtgcagccagggggctcactccgtttgtcctgtgcagcttctggcttcaacattaaagacacctatatacactgggtgcgtcaggccccgggtaagggcctggaatgggttgcaaggatttatcctacgaatggttatactagatatgccgatagcgtcaagggccgtttcactataagcgcagacacatccaaaaacacagcctacctgcagatgaacagcctgcgtgctgaggacactgccgtctattattgttctagatggggaggggacggcttctatgctatggactactggggtcaaggaaccctggtcaccgtctcctcggctagcaccaagggcccatcggtcttccccctggcaccctcctccaagagcacctctgggggcacagcggccctgggctgcctggtcaaggactacttccccgaaccggtgacggtgtcgtggaactcaggcgccctgaccagcggcgtgcacaccttcccggctgtcctacagtcctcaggactctactccctcagcagcgtggtgaccgtgccctccagcagcttgggcacccagacctacatctgcaacgtgaatcacaagcccagcaacaccaaggtggacaagagagttgagcccaaatcttgtgacaaaactcacacatgcccaccgtgcccagcacctgaagccgcggggggaccgtcagtcttcctcttccccccaaaacccaaggacaccctcatgatctcccggacccctgaggtcacatgcgtggtggtggacgtgagccacgaagaccctgaggtcaagttcaactggtacgtggacggcgtggaggtgcataatgccaagacaaagccgcgggaggagcagtacgccagcacgtaccgtgtggtcagcgtcctcaccgtcctgcaccaggactggctgaatggcaaggagtacaagtgcgcggtctccaacaaagccctcccagcccccatcgagaaaaccatctccaaagccaaagggcagccccgagaaccacaggtgtacaccctgcccccatcccgggatgagctgaccaagaaccaggtcagcctgacctgcctggtcaaaggcttctatcccagcgacatcgccgtggagtgggagagcaatgggcagccggagaacaactacaagaccacgcctcccgtgctggactccgacggctccttcttcctctatagcaagctcaccgtggacaagagcaggtggcagcaggggaacgtcttctcatgctccgtgatgcatgaggctctgcacaaccactacacgcagaagagcctctccctgtctccgggtggcggtggagggtccggcggtggtggatccgaggtgcagctgttggagtctgggggaggcttggtacagcctggggggtccctgagactctcctgtgcagcctctggattctccttcagtagcgggtacgacatgtgctgggtccgccaggctccagggaagtgcctggagtggatcgcatgcattgctgctggtagtgctggtatcacttacgacgcgaactgggcgaaaggccggttcaccatctccagagacaattccaagaacacgctgtatctgcaaatgaacagcctgagagccgaggacacggccgtatattactgtgcgagatcggcgttttcgttcgactacgccatggacctctggggccagggaaccctggtcaccgtctcgagcggtggaggcggttcaggcggaggtggaagtggtggtggcggctctggaggcggcggatctgacatccagatgacccagtctccttccaccctgtctgcatctgtaggagacagagtcaccatcacttgccaggccagtcagagcattagttcccacttaaactggtatcagcagaaaccagggaaagcccctaagctcctgatctataaggcatccactctggcatctggggtcccatcaaggttcagcggcagtggatctgggacagaatttactctcaccatcagcagcctgcagcctgatgattttgcaacttattactgccaacagggttatagttggggtaatgttgataatgttttcggctgcgggaccaaggtggagatcaaaggtggtggcggctctggaggaggagggtccggacggtcgctggtggagtctgggggaggcttggtccagcctggggggtccctgagactctcctgtactgcctctggattcaccatcagtagctaccacatgcagtgggtccggcaggcacctgggaagtgcctggagtacatcggaaccattagtagtggtggtaatgtatactacgcaagctccgctagaggcagattcaccatctccagaccctcgtccaagaacacggtggatcttcaaatgaacagcctgagagccgaggacacggctgtgtattactgtgcgagagactctggttatagtgatcctatgtggggccagggaaccctggtcaccgtctcttcaggcggtggcggtagtgggggaggcggttctggcggcggagggtccggcggtggaggatcagacgttgtgatgacccagtctccatcttccgtgtctgcatctgtaggagacagagtcaccatcacctgtcaggccagtcagaacattaggacttacttatcctggtatcagcagaaaccagggaaagcccctaagctcctgatctatgctgcagccaatctggcatctggggtcccatcaaggttcagcggcagtggatctgggacagatttcactctcaccatcagcgacttggaacctggcgatgctgcaacttactattgtcagtctacctatcttggtactgattatgttggcggtgctttcggctgtgggaccaaggtggagatcaaatga

SEQ ID NO: 66 - protein, 1230 aa, Artificial Sequence
  Synthesized
EIVMTQSPSTLSASVGDRVIITCQASESISSWLAWYQQKPGKAPKLLIYEASKLASGVPSRFSGSGSGAEFTLTISSLQPDDFATYYCQGYFYFISRTYVNSFGCGTKLTVLGGGGSGGGGSGGGGSGGGGSEVQLVESGGGLVQPGGSLRLSCTASGFTISTNAMSWVRQAPGKCLEWVGVITGRDITYYASWAKGRFTISRDTSKNTVYLQMNSLRAEDTAVYYCARDGGSSAITSNNIWGQGTLVTVSTGGGGSGGGGSEVQLVESGGGLVQPGGSLRLSCAASGFNIKDTYIHWVRQAPGKGLEWVARIYPTNGYTRYADSVKGRFTISADTSKNTAYLQMNSLRAEDTAVYYCSRWGGDGFYAMDYWGQGTLVTVSSASTKGPSVFPLAPSSKSTSGGTAALGCLVKDYFPEPVTVSWNSGALTSGVHTFPAVLQSSGLYSLSSVVTVPSSSLGTQTYICNVNHKPSNTKVDKRVEPKSCDKTHTCPPCPAPEAAGGPSVFLFPPKPKDTLMISRTPEVTCVVVDVSHEDPEVKFNWYVDGVEVHNAKTKPREEQYASTYRVVSVLTVLHQDWLNGKEYKCAVSNKALPAPIEKTISKAKGQPREPQVYTLPPSRDELTKNQVSLTCLVKGFYPSDIAVEWESNGQPENNYKTTPPVLDSDGSFFLYSKLTVDKSRWQQGNVFSCSVMHEALHNHYTQKSLSLSPGGGGGSGGGGSEVQLLESGGGLVQPGGSLRLSCAASGFSFSSGYDMCWVRQAPGKCLEWIACIAAGSAGITYDANWAKGRFTISRDNSKNTLYLQMNSLRAEDTAVYYCARSAFSFDYAMDLWGQGTLVTVSSGGGGSGGGGSGGGGSGGGGSDIQMTQSPSTLSASVGDRVTITCQASQSISSHLNWYQQKPGKAPKLLIYKASTLASGVPSRFSGSGSGTEFTLTISSLQPDDFATYYCQQGYSWGNVDNVFGCGTKVEIKGGGGSGGGGSGRSLVESGGGLVQPGGSLRLSCTASGFTISSYHMQWVRQAPGKCLEYIGTISSGGNVYYASSARGRFTISRPSSKNTVDLQMNSLRAEDTAVYYCARDSGYSDPMWGQGTLVTVSSGGGGSGGGGSGGGGSGGGGSDVVMTQSPSSVSASVGDRVTITCQASQNIRTYLSWYQQKPGKAPKLLIYAAANLASGVPSRFSGSGSGTDFTLTISDLEPGDAATYYCQSTYLGTDYVGGAFGCGTKVEIK

SEQ ID NO: 67 - DNA, 1569 bp, Artificial Sequence
  Synthesized
gatatccagatgacccagtccccgagctccctgtccgcctctgtgggcgatagggtcaccatcacctgccgtgccagtcaggatgtgaatactgctgtagcctggtatcaacagaaaccaggaaaagctccgaaactactgatttactcggcatccttcctctactctggagtcccttctcgcttctctggctccagatctgggacggatttcactctgaccatcagcagtctgcagccggaagacttcgcaacttattactgtcagcaacattatactactcctcccacgttcggacagggtaccaaggtggagatcaaacgtacggtggctgcaccatctgtcttcatcttcccgccatctgatgagcagttgaaatctggaactgcctctgttgtgtgcctgctgaataacttctatcccagagaggccaaagtacagtggaaggtggataacgccctccaatcgggtaactcccaggagagtgtcacagagcaggacagcaaggacagcacctacagcctcagcagcaccctgacgctgagcaaagcagactacgagaaacacaaagtctacgcctgcgaagtcacccatcagggcctgagctcgcccgtcacaaagagcttcaacaggggagagtgtggcggtggagggtccggcggtggtggatcctttcttaattcccttttcaaccaagaggttcagatccccttgactgaaagctattgcggcccttgtccgaaaaactggatatgttacaagaataattgttaccaattcttcgacgaaagcaagaactggtatgagagtcaggcgtcttgtatgagtcagaatgccagcctgcttaaggtttattcaaaagaagaccaggatctgcttaagttggtaaagagctaccactggatggggctggtacatatcccaacgaatgggtcatggcagtgggaggacggttctattctgagtccaaatctcctgacgatcatcgaaatgcagaaaggggactgtgccctgtatgcatcatccttcaaggggtacatcgagaactgcagtaccccaaatacctacatttgtatgcaaagaacggttggaggcggtggctcaggcggaggcggctcaggaggtggcggttcaggaggcggcggatctttcctaaactcattattcaaccaagaagttcaaattcccttgaccgaaagttactgtggcccatgtcctaaaaactggatatgttacaaaaataactgctaccaattttttgatgagagtaaaaactggtatgagagccaggcttcttgtatgtctcaaaatgccagccttctgaaagtatacagcaaagaggaccaggatttacttaaactggtgaagtcatatcattggatgggactagtacacattccaacaaatggatcttggcagtgggaagatggctccattctctcacccaacctactaacaataattgaaatgcagaagggagactgtgcactctatgcctcgagctttaaaggctatatagaaaactgttcaactccaaatacgtacatctgcatgcaaaggactgtgtag

SEQ ID NO: 68 - protein, 522 aa, Artificial Sequence
  Synthesized
DIQMTQSPSSLSASVGDRVTITCRASQDVNTAVAWYQQKPGKAPKLLIYSASFLYSGVPSRFSGSRSGTDFTLTISSLQPEDFATYYCQQHYTTPPTFGQGTKVEIKRTVAAPSVFIFPPSDEQLKSGTASVVCLLNNFYPREAKVQWKVDNALQSGNSQESVTEQDSKDSTYSLSSTLTLSKADYEKHKVYACEVTHQGLSSPVTKSFNRGECGGGGSGGGGSFLNSLFNQEVQIPLTESYCGPCPKNWICYKNNCYQFFDESKNWYESQASCMSQNASLLKVYSKEDQDLLKLVKSYHWMGLVHIPTNGSWQWEDGSILSPNLLTIIEMQKGDCALYASSFKGYIENCSTPNTYICMQRTVGGGGSGGGGSGGGGSGGGGSFLNSLFNQEVQIPLTESYCGPCPKNWICYKNNCYQFFDESKNWYESQASCMSQNASLLKVYSKEDQDLLKLVKSYHWMGLVHIPTNGSWQWEDGSILSPNLLTIIEMQKGDCALYASSFKGYIENCSTPNTYICMQRTV

SEQ ID NO: 69 - DNA, 3681 bp, Artificial Sequence
  Synthesized
gagatcgtgatgacccagagccccagcaccctgagcgccagcgtgggcgacagggtgatcatcacctgccaggccagcgagagcatcagcagctggctggcctggtaccagcagaagcccggcaaggcccccaagctgctgatctacgaggccagcaagctggccagcggcgtgcccagcaggttcagcggcagcggcagcggcgccgagttcaccctgaccatcagcagcctgcagcccgacgacttcgccacctactactgccagggctacttctacttcatcagcaggacctacgtgaacagcttcggctgcggcaccaagctgaccgtgctgggcggtggcggtagtgggggaggcggttctggcggcggagggtccggcggtggaggatcagaggtgcagctggtggagagcggcggcggcctggtgcagcccggcggcagcctgaggctgagctgcaccgccagcggcttcaccatcagcaccaacgccatgagctgggtgaggcaggcccccggcaagtgcctggagtgggtgggcgtgatcaccggcagggacatcacctactacgccagctgggccaagggcaggttcaccatcagcagggacaccagcaagaacaccgtgtacctgcagatgaacagcctgagggccgaggacaccgccgtgtactactgcgccagggacggcggcagcagcgccatcaccagcaacaacatctggggccagggcaccctggtgaccgtgtcgacaggcggtggagggtccggcggtggtggatcagatgtgcagcttcaggagtcgggacctagcctggtgaaaccttctcagtctctgtccctcacctgcactgtcactggctactcaatcaccagtgattttgcctggaactggattcggcagtttccaggaaacaagctggagtggatgggctacataagttatagtggtaacactaggtacaacccatctctcaaaagtcgaatctctatcactcgcgacacatccaagaaccaattcttcctgcagttgaactctgtgactattgaggacacagccacatattactgtgtaacggcgggacgcgggtttccttattggggccaagggactctggtcactgtctctgcagctagcaccaagggcccatcggtcttccccctggcaccctcctccaagagcacctctgggggcacagcggccctgggctgcctggtcaaggactacttccccgaaccggtgacggtgtcgtggaactcaggcgccctgaccagcggcgtgcacaccttcccggctgtcctacagtcctcaggactctactccctcagcagcgtggtgaccgtgccctccagcagcttgggcacccagacctacatctgcaacgtgaatcacaagcccagcaacaccaaggtggacaagagagttgagcccaaatcttgtgacaaaactcacacatgcccaccgtgcccagcacctgaagccgcggggggaccgtcagtcttcctcttccccccaaaacccaaggacaccctcatgatctcccggacccctgaggtcacatgcgtggtggtggacgtgagccacgaagaccctgaggtcaagttcaactggtacgtggacggcgtggaggtgcataatgccaagacaaagccgcgggaggagcagtacgccagcacgtaccgtgtggtcagcgtcctcaccgtcctgcaccaggactggctgaatggcaaggagtacaagtgcgcggtctccaacaaagccctcccagcccccatcgagaaaaccatctccaaagccaaagggcagccccgagaaccacaggtgtacaccctgcccccatcccgggatgagctgaccaagaaccaggtcagcctgacctgcctggtcaaaggcttctatcccagcgacatcgccgtggagtgggagagcaatgggcagccggagaacaactacaagaccacgcctcccgtgctggactccgacggctccttcttcctctatagcaagctcaccgtggacaagagcaggtggcagcaggggaacgtcttctcatgctccgtgatgcatgaggctctgcacaaccactacacgcagaagagcctctccctgtctccgggtggcggtggagggtccggcggtggtggatccgaggtgcagctgttggagtctgggggaggcttggtacagcctggggggtccctgagactctcctgtgcagcctctggattctccttcagtagcgggtacgacatgtgctgggtccgccaggctccagggaagtgcctggagtggatcgcatgcattgctgctggtagtgctggtatcacttacgacgcgaactgggcgaaaggccggttcaccatctccagagacaattccaagaacacgctgtatctgcaaatgaacagcctgagagccgaggacacggccgtatattactgtgcgagatcggcgttttcgttcgactacgccatggacctctggggccagggaaccctggtcaccgtctcgagcggtggaggcggttcaggcggaggtggaagtggtggtggcggctctggaggcggcggatctgacatccagatgacccagtctccttccaccctgtctgcatctgtaggagacagagtcaccatcacttgccaggccagtcagagcattagttcccacttaaactggtatcagcagaaaccagggaaagcccctaagctcctgatctataaggcatccactctggcatctggggtcccatcaaggttcagcggcagtggatctgggacagaatttactctcaccatcagcagcctgcagcctgatgattttgcaacttattactgccaacagggttatagttggggtaatgttgataatgttttcggctgcgggaccaaggtggagatcaaaggtggtggcggctctggaggaggagggtccggacggtcgctggtggagtctgggggaggcttggtccagcctggggggtccctgagactctcctgtactgcctctggattcaccatcagtagctaccacatgcagtgggtccggcaggcacctgggaagtgcctggagtacatcggaaccattagtagtggtggtaatgtatactacgcaagctccgctagaggcagattcaccatctccagaccctcgtccaagaacacggtggatcttcaaatgaacagcctgagagccgaggacacggctgtgtattactgtgcgagagactctggttatagtgatcctatgtggggccagggaaccctggtcaccgtctcttcaggcggtggcggtagtgggggaggcggttctggcggcggagggtccggcggtggaggatcagacgttgtgatgacccagtctccatcttccgtgtctgcatctgtaggagacagagtcaccatcacctgtcaggccagtcagaacattaggacttacttatcctggtatcagcagaaaccagggaaagcccctaagctcctgatctatgctgcagccaatctggcatctggggtcccatcaaggttcagcggcagtggatctgggacagatttcactctcaccatcagcgacttggaacctggcgatgctgcaacttactattgtcagtctacctatcttggtactgattatgttggcggtgctttcggctgtgggaccaaggtggagatcaaatga

SEQ ID NO: 70 - protein, 1226 aa, Artificial Sequence
  Synthesized
EIVMTQSPSTLSASVGDRVIITCQASESISSWLAWYQQKPGKAPKLLIYEASKLASGVPSRFSGSGSGAEFTLTISSLQPDDFATYYCQGYFYFISRTYVNSFGCGTKLTVLGGGGSGGGGSGGGGSGGGGSEVQLVESGGGLVQPGGSLRLSCTASGFTISTNAMSWVRQAPGKCLEWVGVITGRDITYYASWAKGRFTISRDTSKNTVYLQMNSLRAEDTAVYYCARDGGSSAITSNNIWGQGTLVTVSTGGGGSGGGGSDVQLQESGPSLVKPSQSLSLTCTVTGYSITSDFAWNWIRQFPGNKLEWMGYISYSGNTRYNPSLKSRISITRDTSKNQFFLQLNSVTIEDTATYYCVTAGRGFPYWGQGTLVTVSAASTKGPSVFPLAPSSKSTSGGTAALGCLVKDYFPEPVTVSWNSGALTSGVHTFPAVLQSSGLYSLSSVVTVPSSSLGTQTYICNVNHKPSNTKVDKRVEPKSCDKTHTCPPCPAPEAAGGPSVFLFPPKPKDTLMISRTPEVTCVVVDVSHEDPEVKFNWYVDGVEVHNAKTKPREEQYASTYRVVSVLTVLHQDWLNGKEYKCAVSNKALPAPIEKTISKAKGQPREPQVYTLPPSRDELTKNQVSLTCLVKGFYPSDIAVEWESNGQPENNYKTTPPVLDSDGSFFLYSKLTVDKSRWQQGNVFSCSVMHEALHNHYTQKSLSLSPGGGGGSGGGGSEVQLLESGGGLVQPGGSLRLSCAASGFSFSSGYDMCWVRQAPGKCLEWIACIAAGSAGITYDANWAKGRFTISRDNSKNTLYLQMNSLRAEDTAVYYCARSAFSFDYAMDLWGQGTLVTVSSGGGGSGGGGSGGGGSGGGGSDIQMTQSPSTLSASVGDRVTITCQASQSISSHLNWYQQKPGKAPKLLIYKASTLASGVPSRFSGSGSGTEFTLTISSLQPDDFATYYCQQGYSWGNVDNVFGCGTKVEIKGGGGSGGGGSGRSLVESGGGLVQPGGSLRLSCTASGFTISSYHMQWVRQAPGKCLEYIGTISSGGNVYYASSARGRFTISRPSSKNTVDLQMNSLRAEDTAVYYCARDSGYSDPMWGQGTLVTVSSGGGGSGGGGSGGGGSGGGGSDVVMTQSPSSVSASVGDRVTITCQASQNIRTYLSWYQQKPGKAPKLLIYAAANLASGVPSRFSGSGSGTDFTLTISDLEPGDAATYYCQSTYLGTDYVGGAFGCGTKVEIK

SEQ ID NO: 71 - DNA, 1569 bp, Artificial Sequence
  Synthesized
gacatcctgatgacccaatctccatcctccatgtctgtatctctgggagacacagtcagcatcacttgccattcaagtcaggacattaacagtaatatagggtggttgcagcagagaccagggaaatcatttaagggcctgatctatcatggaaccaacttggacgatgaagttccatcaaggttcagtggcagtggatctggagccgattattctctcaccatcagcagcctggaatctgaagattttgcagactattactgtgtacagtatgctcagtttccgtggacgttcggtggaggcaccaagctggaaatcaaacgtacggtggctgcaccatctgtcttcatcttcccgccatctgatgagcagttgaaatctggaactgcctctgttgtgtgcctgctgaataacttctatcccagagaggccaaagtacagtggaaggtggataacgccctccaatcgggtaactcccaggagagtgtcacagagcaggacagcaaggacagcacctacagcctcagcagcaccctgacgctgagcaaagcagactacgagaaacacaaagtctacgcctgcgaagtcacccatcagggcctgagctcgcccgtcacaaagagcttcaacaggggagagtgtggcggtggagggtccggcggtggtggatcctttcttaattcccttttcaaccaagaggttcagatccccttgactgaaagctattgcggcccttgtccgaaaaactggatatgttacaagaataattgttaccaattcttcgacgaaagcaagaactggtatgagagtcaggcgtcttgtatgagtcagaatgccagcctgcttaaggtttattcaaaagaagaccaggatctgcttaagttggtaaagagctaccactggatggggctggtacatatcccaacgaatgggtcatggcagtgggaggacggttctattctgagtccaaatctcctgacgatcatcgaaatgcagaaaggggactgtgccctgtatgcatcatccttcaaggggtacatcgagaactgcagtaccccaaatacctacatttgtatgcaaagaacggttggaggcggtggctcaggcggaggcggctcaggaggtggcggttcaggaggcggcggatctttcctaaactcattattcaaccaagaagttcaaattcccttgaccgaaagttactgtggcccatgtcctaaaaactggatatgttacaaaaataactgctaccaattttttgatgagagtaaaaactggtatgagagccaggcttcttgtatgtctcaaaatgccagccttctgaaagtatacagcaaagaggaccaggatttacttaaactggtgaagtcatatcattggatgggactagtacacattccaacaaatggatcttggcagtgggaagatggctccattctctcacccaacctactaacaataattgaaatgcagaagggagactgtgcactctatgcctcgagctttaaaggctatatagaaaactgttcaactccaaatacgtacatctgcatgcaaaggactgtgtag

SEQ ID NO: 72 - protein, 522 aa, Artificial Sequence
  Synthesized
DILMTQSPSSMSVSLGDTVSITCHSSQDINSNIGWLQQRPGKSFKGLIYHGTNLDDEVPSRFSGSGSGADYSLTISSLESEDFADYYCVQYAQFPWTFGGGTKLEIKRTVAAPSVFIFPPSDEQLKSGTASVVCLLNNFYPREAKVQWKVDNALQSGNSQESVTEQDSKDSTYSLSSTLTLSKADYEKHKVYACEVTHQGLSSPVTKSFNRGECGGGGSGGGGSFLNSLFNQEVQIPLTESYCGPCPKNWICYKNNCYQFFDESKNWYESQASCMSQNASLLKVYSKEDQDLLKLVKSYHWMGLVHIPTNGSWQWEDGSILSPNLLTIIEMQKGDCALYASSFKGYIENCSTPNTYICMQRTVGGGGSGGGGSGGGGSGGGGSFLNSLFNQEVQIPLTESYCGPCPKNWICYKNNCYQFFDESKNWYESQASCMSQNASLLKVYSKEDQDLLKLVKSYHWMGLVHIPTNGSWQWEDGSILSPNLLTIIEMQKGDCALYASSFKGYIENCSTPNTYICMQRTV

SEQ ID NO: 73 - DNA, 3681 bp, Artificial Sequence
  Synthesized
gagatcgtgatgacccagagccccagcaccctgagcgccagcgtgggcgacagggtgatcatcacctgccaggccagcgagagcatcagcagctggctggcctggtaccagcagaagcccggcaaggcccccaagctgctgatctacgaggccagcaagctggccagcggcgtgcccagcaggttcagcggcagcggcagcggcgccgagttcaccctgaccatcagcagcctgcagcccgacgacttcgccacctactactgccagggctacttctacttcatcagcaggacctacgtgaacagcttcggctgcggcaccaagctgaccgtgctgggcggtggcggtagtgggggaggcggttctggcggcggagggtccggcggtggaggatcagaggtgcagctggtggagagcggcggcggcctggtgcagcccggcggcagcctgaggctgagctgcaccgccagcggcttcaccatcagcaccaacgccatgagctgggtgaggcaggcccccggcaagtgcctggagtgggtgggcgtgatcaccggcagggacatcacctactacgccagctgggccaagggcaggttcaccatcagcagggacaccagcaagaacaccgtgtacctgcagatgaacagcctgagggccgaggacaccgccgtgtactactgcgccagggacggcggcagcagcgccatcaccagcaacaacatctggggccagggcaccctggtgaccgtgtcgacaggcggtggagggtccggcggtggtggatcagaggtccaattggtacaatccggcgctgaggttaagaaaccgggttcctcagtcaaagttagttgtaaggcatcaggttacacgatcactgatagtaacatacattgggtgagacaggctcctgggcagtcccttgagtggattggatacatttatccatataatggcggcacggattacaaccagaaatttaagaatagagcgacactgaccgttgacaaccccaccaataccgcgtatatggaattgtcaagcctgaggtctgaggacacggccttctactattgcgtaaacggtaacccgtggctggcctactgggggcaggggacactcgtaaccgtctcttctgctagcaccaagggcccatcggtcttccccctggcaccctcctccaagagcacctctgggggcacagcggccctgggctgcctggtcaaggactacttccccgaaccggtgacggtgtcgtggaactcaggcgccctgaccagcggcgtgcacaccttcccggctgtcctacagtcctcaggactctactccctcagcagcgtggtgaccgtgccctccagcagcttgggcacccagacctacatctgcaacgtgaatcacaagcccagcaacaccaaggtggacaagagagttgagcccaaatcttgtgacaaaactcacacatgcccaccgtgcccagcacctgaagccgcggggggaccgtcagtcttcctcttccccccaaaacccaaggacaccctcatgatctcccggacccctgaggtcacatgcgtggtggtggacgtgagccacgaagaccctgaggtcaagttcaactggtacgtggacggcgtggaggtgcataatgccaagacaaagccgcgggaggagcagtacgccagcacgtaccgtgtggtcagcgtcctcaccgtcctgcaccaggactggctgaatggcaaggagtacaagtgcgcggtctccaacaaagccctcccagcccccatcgagaaaaccatctccaaagccaaagggcagccccgagaaccacaggtgtacaccctgcccccatcccgggatgagctgaccaagaaccaggtcagcctgacctgcctggtcaaaggcttctatcccagcgacatcgccgtggagtgggagagcaatgggcagccggagaacaactacaagaccacgcctcccgtgctggactccgacggctccttcttcctctatagcaagctcaccgtggacaagagcaggtggcagcaggggaacgtcttctcatgctccgtgatgcatgaggctctgcacaaccactacacgcagaagagcctctccctgtctccgggtggcggtggagggtccggcggtggtggatccgaggtgcagctgttggagtctgggggaggcttggtacagcctggggggtccctgagactctcctgtgcagcctctggattctccttcagtagcgggtacgacatgtgctgggtccgccaggctccagggaagtgcctggagtggatcgcatgcattgctgctggtagtgctggtatcacttacgacgcgaactgggcgaaaggccggttcaccatctccagagacaattccaagaacacgctgtatctgcaaatgaacagcctgagagccgaggacacggccgtatattactgtgcgagatcggcgttttcgttcgactacgccatggacctctggggccagggaaccctggtcaccgtctcgagcggtggaggcggttcaggcggaggtggaagtggtggtggcggctctggaggcggcggatctgacatccagatgacccagtctccttccaccctgtctgcatctgtaggagacagagtcaccatcacttgccaggccagtcagagcattagttcccacttaaactggtatcagcagaaaccagggaaagcccctaagctcctgatctataaggcatccactctggcatctggggtcccatcaaggttcagcggcagtggatctgggacagaatttactctcaccatcagcagcctgcagcctgatgattttgcaacttattactgccaacagggttatagttggggtaatgttgataatgttttcggctgcgggaccaaggtggagatcaaaggtggtggcggctctggaggaggagggtccggacggtcgctggtggagtctgggggaggcttggtccagcctggggggtccctgagactctcctgtactgcctctggattcaccatcagtagctaccacatgcagtgggtccggcaggcacctgggaagtgcctggagtacatcggaaccattagtagtggtggtaatgtatactacgcaagctccgctagaggcagattcaccatctccagaccctcgtccaagaacacggtggatcttcaaatgaacagcctgagagccgaggacacggctgtgtattactgtgcgagagactctggttatagtgatcctatgtggggccagggaaccctggtcaccgtctcttcaggcggtggcggtagtgggggaggcggttctggcggcggagggtccggcggtggaggatcagacgttgtgatgacccagtctccatcttccgtgtctgcatctgtaggagacagagtcaccatcacctgtcaggccagtcagaacattaggacttacttatcctggtatcagcagaaaccagggaaagcccctaagctcctgatctatgctgcagccaatctggcatctggggtcccatcaaggttcagcggcagtggatctgggacagatttcactctcaccatcagcgacttggaacctggcgatgctgcaacttactattgtcagtctacctatcttggtactgattatgttggcggtgctttcggctgtgggaccaaggtggagatcaaatga

SEQ ID NO: 74 - protein, 1226 aa, Artificial Sequence
  Synthesized
EIVMTQSPSTLSASVGDRVIITCQASESISSWLAWYQQKPGKAPKLLIYEASKLASGVPSRFSGSGSGAEFTLTISSLQPDDFATYYCQGYFYFISRTYVNSFGCGTKLTVLGGGGSGGGGSGGGGSGGGGSEVQLVESGGGLVQPGGSLRLSCTASGFTISTNAMSWVRQAPGKCLEWVGVITGRDITYYASWAKGRFTISRDTSKNTVYLQMNSLRAEDTAVYYCARDGGSSAITSNNIWGQGTLVTVSTGGGGSGGGGSEVQLVQSGAEVKKPGSSVKVSCKASGYTITDSNIHWVRQAPGQSLEWIGYIYPYNGGTDYNQKFKNRATLTVDNPTNTAYMELSSLRSEDTAFYYCVNGNPWLAYWGQGTLVTVSSASTKGPSVFPLAPSSKSTSGGTAALGCLVKDYFPEPVTVSWNSGALTSGVHTFPAVLQSSGLYSLSSVVTVPSSSLGTQTYICNVNHKPSNTKVDKRVEPKSCDKTHTCPPCPAPEAAGGPSVFLFPPKPKDTLMISRTPEVTCVVVDVSHEDPEVKFNWYVDGVEVHNAKTKPREEQYASTYRVVSVLTVLHQDWLNGKEYKCAVSNKALPAPIEKTISKAKGQPREPQVYTLPPSRDELTKNQVSLTCLVKGFYPSDIAVEWESNGQPENNYKTTPPVLDSDGSFFLYSKLTVDKSRWQQGNVFSCSVMHEALHNHYTQKSLSLSPGGGGGSGGGGSEVQLLESGGGLVQPGGSLRLSCAASGFSFSSGYDMCWVRQAPGKCLEWIACIAAGSAGITYDANWAKGRFTISRDNSKNTLYLQMNSLRAEDTAVYYCARSAFSFDYAMDLWGQGTLVTVSSGGGGSGGGGSGGGGSGGGGSDIQMTQSPSTLSASVGDRVTITCQASQSISSHLNWYQQKPGKAPKLLIYKASTLASGVPSRFSGSGSGTEFTLTISSLQPDDFATYYCQQGYSWGNVDNVFGCGTKVEIKGGGGSGGGGSGRSLVESGGGLVQPGGSLRLSCTASGFTISSYHMQWVRQAPGKCLEYIGTISSGGNVYYASSARGRFTISRPSSKNTVDLQMNSLRAEDTAVYYCARDSGYSDPMWGQGTLVTVSSGGGGSGGGGSGGGGSGGGGSDVVMTQSPSSVSASVGDRVTITCQASQNIRTYLSWYQQKPGKAPKLLIYAAANLASGVPSRFSGSGSGTDFTLTISDLEPGDAATYYCQSTYLGTDYVGGAFGCGTKVEIK

SEQ ID NO: 75 - DNA, 1581 bp, Artificial Sequence
  Synthesized
gatatacaacttacgcagtctccctccactctgtcagcgtccgtaggggacagagtaacgataacatgcagggcctcagaaagtcttgacaactacggcataaggttcctcacatggtttcaacagaagccgggtaaagcaccaaaactcctgatgtatgctgcgtctaaccaggggtccggtgttcctagtcggttttcaggcagcggtagcggtaccgagttcactctcacaatttccagtcttcagcctgacgatttcgcaacgtattattgccaacaaactaaggaagtgccttggagctttgggcaaggcaccaaggtcgaggtgaagcgtacggtggctgcaccatctgtcttcatcttcccgccatctgatgagcagttgaaatctggaactgcctctgttgtgtgcctgctgaataacttctatcccagagaggccaaagtacagtggaaggtggataacgccctccaatcgggtaactcccaggagagtgtcacagagcaggacagcaaggacagcacctacagcctcagcagcaccctgacgctgagcaaagcagactacgagaaacacaaagtctacgcctgcgaagtcacccatcagggcctgagctcgcccgtcacaaagagcttcaacaggggagagtgtggcggtggagggtccggcggtggtggatcctttcttaattcccttttcaaccaagaggttcagatccccttgactgaaagctattgcggcccttgtccgaaaaactggatatgttacaagaataattgttaccaattcttcgacgaaagcaagaactggtatgagagtcaggcgtcttgtatgagtcagaatgccagcctgcttaaggtttattcaaaagaagaccaggatctgcttaagttggtaaagagctaccactggatggggctggtacatatcccaacgaatgggtcatggcagtgggaggacggttctattctgagtccaaatctcctgacgatcatcgaaatgcagaaaggggactgtgccctgtatgcatcatccttcaaggggtacatcgagaactgcagtaccccaaatacctacatttgtatgcaaagaacggttggaggcggtggctcaggcggaggcggctcaggaggtggcggttcaggaggcggcggatctttcctaaactcattattcaaccaagaagttcaaattcccttgaccgaaagttactgtggcccatgtcctaaaaactggatatgttacaaaaataactgctaccaattttttgatgagagtaaaaactggtatgagagccaggcttcttgtatgtctcaaaatgccagccttctgaaagtatacagcaaagaggaccaggatttacttaaactggtgaagtcatatcattggatgggactagtacacattccaacaaatggatcttggcagtgggaagatggctccattctctcacccaacctactaacaataattgaaatgcagaagggagactgtgcactctatgcctcgagctttaaaggctatatagaaaactgttcaactccaaatacgtacatctgcatgcaaaggactgtgtag

SEQ ID NO: 76 - protein, 526 aa, Artificial Sequence
  Synthesized
DIQLTQSPSTLSASVGDRVTITCRASESLDNYGIRFLTWFQQKPGKAPKLLMYAASNQGSGVPSRFSGSGSGTEFTLTISSLQPDDFATYYCQQTKEVPWSFGQGTKVEVKRTVAAPSVFIFPPSDEQLKSGTASVVCLLNNFYPREAKVQWKVDNALQSGNSQESVTEQDSKDSTYSLSSTLTLSKADYEKHKVYACEVTHQGLSSPVTKSFNRGECGGGGSGGGGSFLNSLFNQEVQIPLTESYCGPCPKNWICYKNNCYQFFDESKNWYESQASCMSQNASLLKVYSKEDQDLLKLVKSYHWMGLVHIPTNGSWQWEDGSILSPNLLTIIEMQKGDCALYASSFKGYIENCSTPNTYICMQRTVGGGGSGGGGSGGGGSGGGGSFLNSLFNQEVQIPLTESYCGPCPKNWICYKNNCYQFFDESKNWYESQASCMSQNASLLKVYSKEDQDLLKLVKSYHWMGLVHIPTNGSWQWEDGSILSPNLLTIIEMQKGDCALYASSFKGYIENCSTPNTYICMQRTV

SEQ ID NO: 77 - DNA, 3741 bp, Artificial Sequence
  Synthesized
gagatcgtgatgacacaatctccatctacgctctccgcctcagtgggcgatagagtaattattacttgtcaagcctcagagagcatttcatcatggctcgcctggtatcagcaaaagcctgggaaggcccccaaacttctcatctatgaagcatcaaagctggcctctggggttccgtctcgcttctccgggtccggcagtggtgcagagtttacgttgactatatcttctttgcaacctgacgatttcgcaacatattattgccagggatacttttattttatttcccgaacatatgttaactcttttgggtgcgggaccaaactcactgtgctggggtctaccggtagtggttctaagcctggttcaggcgaaggcagtacgaaaggggaagtgcaactggtcgaaagcggtggagggcttgttcaacctggaggaagcctccgcttgtcctgcacggctagcggctttacaataagtacgaacgccatgagctgggtccggcaggctccaggtaagtgtctcgaatgggtgggggtcataacaggcagggacattacctactacgccagttgggccaagggtcgatttaccatttctagagatacatccaagaacacggtgtacctccagatgaattctcttagggcggaagacacagcagtatactactgcgcgcgagatggcgggagcagtgcgatcacatccaacaacatctggggtcagggcactcttgtcacggtgtcgactggtggtgggggtagtggcggcggaggtagctttcttaattcccttttcaaccaagaggttcagatccccttgactgaaagctattgcggcccttgtccgaaaaactggatatgttacaagaataattgttaccaattcttcgacgaaagcaagaactggtatgagagtcaggcgtcttgtatgagtcagaatgccagcctgcttaaggtttattcaaaagaagaccaggatctgcttaagttggtaaagagctaccactggatggggctggtacatatcccaacgaatgggtcatggcagtgggaggacggttctattctgagtccaaatctcctgacgatcatcgaaatgcagaaaggggactgtgccctgtatgcatcatccttcaaggggtacatcgagaactgcagtaccccaaatacctacatttgtatgcaaagaacggttgctagcaccaagggcccatcggtcttccccctggcaccctcctccaagagcacctctgggggcacagcggccctgggctgcctggtcaaggactacttccccgaaccggtgacggtgtcgtggaactcaggcgccctgaccagcggcgtgcacaccttcccggctgtcctacagtcctcaggactctactccctcagcagcgtggtgaccgtgccctccagcagcttgggcacccagacctacatctgcaacgtgaatcacaagcccagcaacaccaaggtggacaagagagttgagcccaaatcttgtgacaaaactcacacatgcccaccgtgcccagcacctgaagccgcggggggaccgtcagtcttcctcttccccccaaaacccaaggacaccctcatgatctcccggacccctgaggtcacatgcgtggtggtggacgtgagccacgaagaccctgaggtcaagttcaactggtacgtggacggcgtggaggtgcataatgccaagacaaagccgcgggaggagcagtacgccagcacgtaccgtgtggtcagcgtcctcaccgtcctgcaccaggactggctgaatggcaaggagtacaagtgcgcggtctccaacaaagccctcccagcccccatcgagaaaaccatctccaaagccaaagggcagccccgagaaccacaggtgtacaccctgcccccatcccgggatgagctgaccaagaaccaggtcagcctgacctgcctggtcaaaggcttctatcccagcgacatcgccgtggagtgggagagcaatgggcagccggagaacaactacaagaccacgcctcccgtgctggactccgacggctccttcttcctctatagcaagctcaccgtggacaagagcaggtggcagcaggggaacgtcttctcatgctccgtgatgcatgaggctctgcacaaccactacacgcagaagagcctctccctgtctccgggtggcggtggagggtccggcggtggtggatccgaggtgcagctgttggagtctgggggaggcttggtacagcctggggggtccctgagactctcctgtgcagcctctggattctccttcagtagcgggtacgacatgtgctgggtccgccaggctccagggaagtgcctggagtggatcgcatgcattgctgctggtagtgctggtatcacttacgacgcgaactgggcgaaaggccggttcaccatctccagagacaattccaagaacacgctgtatctgcaaatgaacagcctgagagccgaggacacggccgtatattactgtgcgagatcggcgttttcgttcgactacgccatggacctctggggccagggaaccctggtcaccgtctcgagcggtggaggcggttcaggcggaggtggaagtggtggtggcggctctggaggcggcggatctgacatccagatgacccagtctccttccaccctgtctgcatctgtaggagacagagtcaccatcacttgccaggccagtcagagcattagttcccacttaaactggtatcagcagaaaccagggaaagcccctaagctcctgatctataaggcatccactctggcatctggggtcccatcaaggttcagcggcagtggatctgggacagaatttactctcaccatcagcagcctgcagcctgatgattttgcaacttattactgccaacagggttatagttggggtaatgttgataatgttttcggctgcgggaccaaggtggagatcaaaggtggtggcggctctggaggaggagggtccggacggtcgctggtggagtctgggggaggcttggtccagcctggggggtccctgagactctcctgtactgcctctggattcaccatcagtagctaccacatgcagtgggtccggcaggcacctgggaagtgcctggagtacatcggaaccattagtagtggtggtaatgtatactacgcaagctccgctagaggcagattcaccatctccagaccctcgtccaagaacacggtggatcttcaaatgaacagcctgagagccgaggacacggctgtgtattactgtgcgagagactctggttatagtgatcctatgtggggccagggaaccctggtcaccgtctcttcaggcggtggcggtagtgggggaggcggttctggcggcggagggtccggcggtggaggatcagacgttgtgatgacccagtctccatcttccgtgtctgcatctgtaggagacagagtcaccatcacctgtcaggccagtcagaacattaggacttacttatcctggtatcagcagaaaccagggaaagcccctaagctcctgatctatgctgcagccaatctggcatctggggtcccatcaaggttcagcggcagtggatctgggacagatttcactctcaccatcagcgacttggaacctggcgatgctgcaacttactattgtcagtctacctatcttggtactgattatgttggcggtgctttcggctgtgggaccaaggtggagatcaaa

SEQ ID NO: 78 - protein, 1247 aa, Artificial Sequence
  Synthesized
EIVMTQSPSTLSASVGDRVIITCQASESISSWLAWYQQKPGKAPKLLIYEASKLASGVPSRFSGSGSGAEFTLTISSLQPDDFATYYCQGYFYFISRTYVNSFGCGTKLTVLGSTGSGSKPGSGEGSTKGEVQLVESGGGLVQPGGSLRLSCTASGFTISTNAMSWVRQAPGKCLEWVGVITGRDITYYASWAKGRFTISRDTSKNTVYLQMNSLRAEDTAVYYCARDGGSSAITSNNIWGQGTLVTVSTGGGGSGGGGSFLNSLFNQEVQIPLTESYCGPCPKNWICYKNNCYQFFDESKNWYESQASCMSQNASLLKVYSKEDQDLLKLVKSYHWMGLVHIPTNGSWQWEDGSILSPNLLTIIEMQKGDCALYASSFKGYIENCSTPNTYICMQRTVASTKGPSVFPLAPSSKSTSGGTAALGCLVKDYFPEPVTVSWNSGALTSGVHTFPAVLQSSGLYSLSSVVTVPSSSLGTQTYICNVNHKPSNTKVDKRVEPKSCDKTHTCPPCPAPEAAGGPSVFLFPPKPKDTLMISRTPEVTCVVVDVSHEDPEVKFNWYVDGVEVHNAKTKPREEQYASTYRVVSVLTVLHQDWLNGKEYKCAVSNKALPAPIEKTISKAKGQPREPQVYTLPPSRDELTKNQVSLTCLVKGFYPSDIAVEWESNGQPENNYKTTPPVLDSDGSFFLYSKLTVDKSRWQQGNVFSCSVMHEALHNHYTQKSLSLSPGGGGGSGGGGSEVQLLESGGGLVQPGGSLRLSCAASGFSFSSGYDMCWVRQAPGKCLEWIACIAAGSAGITYDANWAKGRFTISRDNSKNTLYLQMNSLRAEDTAVYYCARSAFSFDYAMDLWGQGTLVTVSSGGGGSGGGGSGGGGSGGGGSDIQMTQSPSTLSASVGDRVTITCQASQSISSHLNWYQQKPGKAPKLLIYKASTLASGVPSRFSGSGSGTEFTLTISSLQPDDFATYYCQQGYSWGNVDNVFGCGTKVEIKGGGGSGGGGSGRSLVESGGGLVQPGGSLRLSCTASGFTISSYHMQWVRQAPGKCLEYIGTISSGGNVYYASSARGRFTISRPSSKNTVDLQMNSLRAEDTAVYYCARDSGYSDPMWGQGTLVTVSSGGGGSGGGGSGGGGSGGGGSDVVMTQSPSSVSASVGDRVTITCQASQNIRTYLSWYQQKPGKAPKLLIYAAANLASGVPSRFSGSGSGTDFTLTISDLEPGDAATYYCQSTYLGTDYVGGAFGCGTKVEIK

SEQ ID NO: 79 - DNA, 1518 bp, Artificial Sequence
  Synthesized
gaaaatgtattgacacagagccccgcctccctcagtgcctcacctggggaaagggtaactatcacttgctctgcatcaagcagcgtctcatacatgcattggtatcaacaaaagcctggacaggcccccaagctctggatatacgatacgagcaagctggcttccggcgtacctagccgcttcagtggttccggctcaggcaacgatcacacccttacgatttccagtatggaacccgaagattttgcaacttattattgtttccaggggagcgtgtacccattcactttcgggcaggggacaaaattggagataaagggaagtactggttctgggtctaaacccggttccggcgaaggtagtactaaaggacaggtcacattgaaggaatctggccccggccttgttcagccaggacagacccttaggctcacctgtgccttcagtggtttttctcttagcactagcggtatgggggtcggctggattcggcagcctcccggcaaaggtcttgagtggttggctcacatttggtgggacgacgacaaacggtataatcctgccttgaaaagtcggctgaccattagtaaggatacctcaaaaaatcaagtgtacttgcaaatgaatagccttgacgccgaggatacggctgtatattattgcgcgcggatggaactctggtcttactactttgattattgggggcaggggactctcgtcacggtgtcctctggtggcggcggctccgggggtggcggatcaggtggtggaggatccttcctaaactcattattcaaccaagaagttcaaattcccttgaccgaaagttactgtggcccatgtcctaaaaactggatatgttacaaaaataactgctaccaattttttgatgagagtaaaaactggtatgagagccaggcttcttgtatgtctcaaaatgccagccttctgaaagtatacagcaaagaggaccaggatttacttaaactggtgaagtcatatcattggatgggactagtacacattccaacaaatggatcttggcagtgggaagatggctccattctctcacccaacctactaacaataattgaaatgcagaagggagactgtgcactctatgcctcgagctttaaaggctatatagaaaactgttcaactccaaatacgtacatctgcatgcaaaggactgtgcgtacggtggctgcaccatctgtcttcatcttcccgccatctgatgagcagttgaaatctggaactgcctctgttgtgtgcctgctgaataacttctatcccagagaggccaaagtacagtggaaggtggataacgccctccaatcgggtaactcccaggagagtgtcacagagcaggacagcaaggacagcacctacagcctcagcagcaccctgacgctgagcaaagcagactacgagaaacacaaagtctacgcctgcgaagtcacccatcagggcctgagctcgcccgtcacaaagagcttcaacaggggagagtgttag

SEQ ID NO: 80 - protein, 505 aa, Artificial Sequence
  Synthesized
ENVLTQSPASLSASPGERVTITCSASSSVSYMHWYQQKPGQAPKLWIYDTSKLASGVPSRFSGSGSGNDHTLTISSMEPEDFATYYCFQGSVYPFTFGQGTKLEIKGSTGSGSKPGSGEGSTKGQVTLKESGPGLVQPGQTLRLTCAFSGFSLSTSGMGVGWIRQPPGKGLEWLAHIWWDDDKRYNPALKSRLTISKDTSKNQVYLQMNSLDAEDTAVYYCARMELWSYYFDYWGQGTLVTVSSGGGGSGGGGSGGGGSFLNSLFNQEVQIPLTESYCGPCPKNWICYKNNCYQFFDESKNWYESQASCMSQNASLLKVYSKEDQDLLKLVKSYHWMGLVHIPTNGSWQWEDGSILSPNLLTIIEMQKGDCALYASSFKGYIENCSTPNTYICMQRTVRTVAAPSVFIFPPSDEQLKSGTASVVCLLNNFYPREAKVQWKVDNALQSGNSQESVTEQDSKDSTYSLSSTLTLSKADYEKHKVYACEVTHQGLSSPVTKSFNRGEC

SEQ ID NO: 81 - DNA, 4689 bp, Artificial Sequence
  Synthesized
gagatcgtgatgacacaatctccatctacgctctccgcctcagtgggcgatagagtaattattacttgtcaagcctcagagagcatttcatcatggctcgcctggtatcagcaaaagcctgggaaggcccccaaacttctcatctatgaagcatcaaagctggcctctggggttccgtctcgcttctccgggtccggcagtggtgcagagtttacgttgactatatcttctttgcaacctgacgatttcgcaacatattattgccagggatacttttattttatttcccgaacatatgttaactcttttgggtgcgggaccaaactcactgtgctggggtctaccggtagtggttctaagcctggttcaggcgaaggcagtacgaaaggggaagtgcaactggtcgaaagcggtggagggcttgttcaacctggaggaagcctccgcttgtcctgcacggctagcggctttacaataagtacgaacgccatgagctgggtccggcaggctccaggtaagtgtctcgaatgggtgggggtcataacaggcagggacattacctactacgccagttgggccaagggtcgatttaccatttctagagatacatccaagaacacggtgtacctccagatgaattctcttagggcggaagacacagcagtatactactgcgcgcgagatggcgggagcagtgcgatcacatccaacaacatctggggtcagggcactcttgtcacggtgtcgactggtggtgggggtagtggcggcggaggtagctttcttaattcccttttcaaccaagaggttcagatccccttgactgaaagctattgcggcccttgtccgaaaaactggatatgttacaagaataattgttaccaattcttcgacgaaagcaagaactggtatgagagtcaggcgtcttgtatgagtcagaatgccagcctgcttaaggtttattcaaaagaagaccaggatctgcttaagttggtaaagagctaccactggatggggctggtacatatcccaacgaatgggtcatggcagtgggaggacggttctattctgagtccaaatctcctgacgatcatcgaaatgcagaaaggggactgtgccctgtatgcatcatccttcaaggggtacatcgagaactgcagtaccccaaatacctacatttgtatgcaaagaacggttgctagcaccaagggcccatcggtcttccccctggcaccctcctccaagagcacctctgggggcacagcggccctgggctgcctggtcaaggactacttccccgaaccggtgacggtgtcgtggaactcaggcgccctgaccagcggcgtgcacaccttcccggctgtcctacagtcctcaggactctactccctcagcagcgtggtgaccgtgccctccagcagcttgggcacccagacctacatctgcaacgtgaatcacaagcccagcaacaccaaggtggacaagagagttgagcccaaatcttgtgacaaaactcacacatgcccaccgtgcccagcacctgaagccgcggggggaccgtcagtcttcctcttccccccaaaacccaaggacaccctcatgatctcccggacccctgaggtcacatgcgtggtggtggacgtgagccacgaagaccctgaggtcaagttcaactggtacgtggacggcgtggaggtgcataatgccaagacaaagccgcgggaggagcagtacgccagcacgtaccgtgtggtcagcgtcctcaccgtcctgcaccaggactggctgaatggcaaggagtacaagtgcgcggtctccaacaaagccctcccagcccccatcgagaaaaccatctccaaagccaaagggcagccccgagaaccacaggtgtacaccctgcccccatcccgggatgagctgaccaagaaccaggtcagcctgacctgcctggtcaaaggcttctatcccagcgacatcgccgtggagtgggagagcaatgggcagccggagaacaactacaagaccacgcctcccgtgctggactccgacggctccttcttcctctatagcaagctcaccgtggacaagagcaggtggcagcaggggaacgtcttctcatgctccgtgatgcatgaggctctgcacaaccactacacgcagaagagcctctccctgtctccgggtggcggtggagggtccggcggtggtggatccgaggtgcagctgttggagtctgggggaggcttggtacagcctggggggtccctgagactctcctgtgcagcctctggattctccttcagtagcgggtacgacatgtgctgggtccgccaggctccagggaagtgcctggagtggatcgcatgcattgctgctggtagtgctggtatcacttacgacgcgaactgggcgaaaggccggttcaccatctccagagacaattccaagaacacgctgtatctgcaaatgaacagcctgagagccgaggacacggccgtatattactgtgcgagatcggcgttttcgttcgactacgccatggacctctggggccagggaaccctggtcaccgtctcgagcggtggaggcggttcaggcggaggtggaagtggtggtggcggctctggaggcggcggatctgacatccagatgacccagtctccttccaccctgtctgcatctgtaggagacagagtcaccatcacttgccaggccagtcagagcattagttcccacttaaactggtatcagcagaaaccagggaaagcccctaagctcctgatctataaggcatccactctggcatctggggtcccatcaaggttcagcggcagtggatctgggacagaatttactctcaccatcagcagcctgcagcctgatgattttgcaacttattactgccaacagggttatagttggggtaatgttgataatgttttcggctgcgggaccaaggtggagatcaaaggtggtggcggctctggaggaggagggtccggacgagagggccccgagctgtctcctgatgacccagcaggcctcttggacttgcggcagggtatgttcgctcaacttgtggctcagaatgttctgctcattgatggaccactctcttggtatagtgaccccggtctggccggggtgagtctgaccggcgggctctcttataaagaggatactaaggaactggtcgtagcaaaagcgggcgtttattacgttttttttcagctggagctcaggcgcgtggtggccggcgagggcagtggctctgtgtccctggccctgcacttacagcccttgagaagcgctgcaggtgctgccgcactggctttaactgttgacctccctccggcctcttctgaagctagaaacagcgctttcggcttccaagggcgcctgctgcacctgagcgcaggccagcgcttaggtgtgcaccttcatacagaggccagggcccgacacgcttggcagctcacacagggtgccacggttctcggacttttccgcgttactcccgagatccccgctggcctcggaagtactggttctgggtctaaacccggttccggcgaaggtagtactaaaggacgagaagggccagagttaagtccagatgaccctgctgggcttttggacctgcggcagggcatgttcgctcaactggtggctcagaacgtgctgctgatcgatggccccctgagttggtacagcgatcccgggctggcaggcgtgtcacttacagggggcctctcttacaaggaagacaccaaggagttagtggtcgctaaggctggcgtgtattacgtgttcttccaactggagctgagaagggttgtggcaggagagggtagcggcagcgtgtctttagcccttcacttgcagcccctgaggtctgctgcaggtgcagccgctctcgcgctcaccgtggatctccccccagcctcatctgaagctaggaacagtgcatttggctttcagggacgcttgctgcacctctccgctggacagaggctgggcgtgcaccttcacacagaggcccgtgccaggcatgcatggcagctcactcagggggcaacagtgctgggtctcttccgcgtgactcctgaaataccagctggacttggcggtggaggcagcggcggaggaggatctcgtgaggggccagaactgtcccccgatgacccagccggactgctcgatctcagacagggcatgttcgctcagcttgtagcccaaaatgtcctcctgattgacggccctttgagctggtatagtgatcccggcttggccggggtatctctgaccggaggcctctcctacaaggaagacaccaaagagctggtggtggcaaaagcgggggtgtattatgtgttctttcagctcgagctgcggagagttgtggccggggaagggtctgggagcgtatctcttgcacttcacctgcagcccctgcgcagcgccgctggagccgccgcccttgctcttactgtggatctgcctcctgcttcctcagaagcacgcaacagcgccttcggctttcaaggacgtctcctgcacttgtccgcaggacagaggttgggcgtccatttacacactgaggcacgggcacggcacgcttggcagcttacccagggagccaccgtgctgggactctttagagtgacacccgagatccccgctggcttg

SEQ ID NO: 82 - protein, 1563 aa, Artificial Sequence
  Synthesized
EIVMTQSPSTLSASVGDRVIITCQASESISSWLAWYQQKPGKAPKLLIYEASKLASGVPSRFSGSGSGAEFTLTISSLQPDDFATYYCQGYFYFISRTYVNSFGCGTKLTVLGSTGSGSKPGSGEGSTKGEVQLVESGGGLVQPGGSLRLSCTASGFTISTNAMSWVRQAPGKCLEWVGVITGRDITYYASWAKGRFTISRDTSKNTVYLQMNSLRAEDTAVYYCARDGGSSAITSNNIWGQGTLVTVSTGGGGSGGGGSFLNSLFNQEVQIPLTESYCGPCPKNWICYKNNCYQFFDESKNWYESQASCMSQNASLLKVYSKEDQDLLKLVKSYHWMGLVHIPTNGSWQWEDGSILSPNLLTIIEMQKGDCALYASSFKGYIENCSTPNTYICMQRTVASTKGPSVFPLAPSSKSTSGGTAALGCLVKDYFPEPVTVSWNSGALTSGVHTFPAVLQSSGLYSLSSVVTVPSSSLGTQTYICNVNHKPSNTKVDKRVEPKSCDKTHTCPPCPAPEAAGGPSVFLFPPKPKDTLMISRTPEVTCVVVDVSHEDPEVKFNWYVDGVEVHNAKTKPREEQYASTYRVVSVLTVLHQDWLNGKEYKCAVSNKALPAPIEKTISKAKGQPREPQVYTLPPSRDELTKNQVSLTCLVKGFYPSDIAVEWESNGQPENNYKTTPPVLDSDGSFFLYSKLTVDKSRWQQGNVFSCSVMHEALHNHYTQKSLSLSPGGGGGSGGGGSEVQLLESGGGLVQPGGSLRLSCAASGFSFSSGYDMCWVRQAPGKCLEWIACIAAGSAGITYDANWAKGRFTISRDNSKNTLYLQMNSLRAEDTAVYYCARSAFSFDYAMDLWGQGTLVTVSSGGGGSGGGGSGGGGSGGGGSDIQMTQSPSTLSASVGDRVTITCQASQSISSHLNWYQQKPGKAPKLLIYKASTLASGVPSRFSGSGSGTEFTLTISSLQPDDFATYYCQQGYSWGNVDNVFGCGTKVEIKGGGGSGGGGSGREGPELSPDDPAGLLDLRQGMFAQLVAQNVLLIDGPLSWYSDPGLAGVSLTGGLSYKEDTKELVVAKAGVYYVFFQLELRRVVAGEGSGSVSLALHLQPLRSAAGAAALALTVDLPPASSEARNSAFGFQGRLLHLSAGQRLGVHLHTEARARHAWQLTQGATVLGLFRVTPEIPAGLGSTGSGSKPGSGEGSTKGREGPELSPDDPAGLLDLRQGMFAQLVAQNVLLIDGPLSWYSDPGLAGVSLTGGLSYKEDTKELVVAKAGVYYVFFQLELRRVVAGEGSGSVSLALHLQPLRSAAGAAALALTVDLPPASSEARNSAFGFQGRLLHLSAGQRLGVHLHTEARARHAWQLTQGATVLGLFRVTPEIPAGLGGGGSGGGGSREGPELSPDDPAGLLDLRQGMFAQLVAQNVLLIDGPLSWYSDPGLAGVSLTGGLSYKEDTKELVVAKAGVYYVFFQLELRRVVAGEGSGSVSLALHLQPLRSAAGAAALALTVDLPPASSEARNSAFGFQGRLLHLSAGQRLGVHLHTEARARHAWQLTQGATVLGLFRVTPEIPAGL

SEQ ID NO: 83 - DNA, 1515 bp, Artificial Sequence
  Synthesized
gaaaatgtattgacacagagccccgcctccctcagtgcctcacctggggaaagggtaactatcacttgctctgcatcaagcagcgtctcatacatgcattggtatcaacaaaagcctggacaggcccccaagctctggatatacgatacgagcaagctggcttccggcgtacctagccgcttcagtggttccggctcaggcaacgatcacacccttacgatttccagtatggaacccgaagattttgcaacttattattgtttccaggggagcgtgtacccattcactttcgggcaggggacaaaattggagataaagggaagtactggttctgggtctaaacccggttccggcgaaggtagtactaaaggacaggtcacattgaaggaatctggccccggccttgttcagccaggacagacccttaggctcacctgtgccttcagtggtttttctcttagcactagcggtatgggggtcggctggattcggcagcctcccggcaaaggtcttgagtggttggctcacatttggtgggacgacgacaaacggtataatcctgccttgaaaagtcggctgaccattagtaaggatacctcaaaaaatcaagtgtacttgcaaatgaatagccttgacgccgaggatacggctgtatattattgcgcgcggatggaactctggtcttactactttgattattgggggcaggggactctcgtcacggtgtcctctggtggcggcggctccgggggtggcggatcaggtggtggaggatccttcctaaactcattattcaaccaagaagttcaaattcccttgaccgaaagttactgtggcccatgtcctaaaaactggatatgttacaaaaataactgctaccaattttttgatgagagtaaaaactggtatgagagccaggcttcttgtatgtctcaaaatgccagccttctgaaagtatacagcaaagaggaccaggatttacttaaactggtgaagtcatatcattggatgggactagtacacattccaacaaatggatcttggcagtgggaagatggctccattctctcacccaacctactaacaataattgaaatgcagaagggagactgtgcactctatgcctcgagctttaaaggctatatagaaaactgttcaactccaaatacgtacatctgcatgcaaaggactgtgcgtacggtggctgcaccatctgtcttcatcttcccgccatctgatgagcagttgaaatctggaactgcctctgttgtgtgcctgctgaataacttctatcccagagaggccaaagtacagtggaaggtggataacgccctccaatcgggtaactcccaggagagtgtcacagagcaggacagcaaggacagcacctacagcctcagcagcaccctgacgctgagcaaagcagactacgagaaacacaaagtctacgcctgcgaagtcacccatcagggcctgagctcgcccgtcacaaagagcttcaacaggggagagtgt

SEQ ID NO: 84 - protein, 505 aa, Artificial Sequence; identical to SEQ ID NO: 80
  Synthesized

SEQ ID NO: 85 - DNA, 3741 bp, Artificial Sequence; identical to SEQ ID NO: 77
  Synthesized

SEQ ID NO: 86 - protein, 1247 aa, Artificial Sequence; identical to SEQ ID NO: 78
  Synthesized

SEQ ID NO: 87 - DNA, 1515 bp, Artificial Sequence
  Synthesized
gacatccagatgacccagtctccatcctccctgtctgcatctgtaggagacagagtcaccatcacttgccaggcgagtcaggacatcagcaactatttaaattggtatcagcagaaaccagggaaagcccctaaactcctgatctacgatgcatccaatttggaaacaggggtcccatcaaggttcagtggaagtggatctgggacagattttactttcaccatcagcagcctgcagcctgaagatattgcaacatatttctgtcaacactttgatcatctcccgctcgctttcggcggagggaccaaggtggaaattaaaggaagtactggttctgggtctaaacccggttccggcgaaggtagtactaaaggacaggtgcagctgcaggagtcgggcccaggactggtgaagccttcggagaccctgtccctcacctgcactgtctctggtggctccgtcagcagtggtgattactactggacctggatccggcagtccccagggaagggactggagtggattggacacatctattacagtgggaacaccaattataacccctccctcaagagccgactcaccatatcaattgacacgtccaagactcagttctccctgaagctgagttctgtgaccgctgcggacacggccatttattactgtgtgcgagatcgagtgactggtgcttttgatatctggggccaagggacaatggtcaccgtctcgagcggtggcggcggctccgggggtggcggatcaggtggtggaggctctttcctaaactcattattcaaccaagaagttcaaattcccttgaccgaaagttactgtggcccatgtcctaaaaactggatatgttacaaaaataactgctaccaattttttgatgagagtaaaaactggtatgagagccaggcttcttgtatgtctcaaaatgccagccttctgaaagtatacagcaaagaggaccaggatttacttaaactggtgaagtcatatcattggatgggactagtacacattccaacaaatggatcttggcagtgggaagatggctccattctctcacccaacctactaacaataattgaaatgcagaagggagactgtgcactctatgcctcgagctttaaaggctatatagaaaactgttcaactccaaatacgtacatctgcatgcaaaggactgtgcgtacggtggctgcaccatctgtcttcatcttcccgccatctgatgagcagttgaaatctggaactgcctctgttgtgtgcctgctgaataacttctatcccagagaggccaaagtacagtggaaggtggataacgccctccaatcgggtaactcccaggagagtgtcacagagcaggacagcaaggacagcacctacagcctcagcagcaccctgacgctgagcaaagcagactacgagaaacacaaagtctacgcctgcgaagtcacccatcagggcctgagctcgcccgtcacaaagagcttcaacaggggagagtgt

SEQ ID NO: 88 - protein, 505 aa, Artificial Sequence
  Synthesized
DIQMTQSPSSLSASVGDRVTITCQASQDISNYLNWYQQKPGKAPKLLIYDASNLETGVPSRFSGSGSGTDFTFTISSLQPEDIATYFCQHFDHLPLAFGGGTKVEIKGSTGSGSKPGSGEGSTKGQVQLQESGPGLVKPSETLSLTCTVSGGSVSSGDYYWTWIRQSPGKGLEWIGHIYYSGNTNYNPSLKSRLTISIDTSKTQFSLKLSSVTAADTAIYYCVRDRVTGAFDIWGQGTMVTVSSGGGGSGGGGSGGGGSFLNSLFNQEVQIPLTESYCGPCPKNWICYKNNCYQFFDESKNWYESQASCMSQNASLLKVYSKEDQDLLKLVKSYHWMGLVHIPTNGSWQWEDGSILSPNLLTIIEMQKGDCALYASSFKGYIENCSTPNTYICMQRTVRTVAAPSVFIFPPSDEQLKSGTASVVCLLNNFYPREAKVQWKVDNALQSGNSQESVTEQDSKDSTYSLSSTLTLSKADYEKHKVYACEVTHQGLSSPVTKSFNRGEC

SEQ ID NO: 89 - DNA, 3693 bp, Artificial Sequence
  Synthesized
gacgtcgtgatgacccagtctccttccaccctgtctgcatctgtaggagacagagtcaccatcaattgccaagccagtgagagcattagcagttggttagcctggtatcagcagaaaccagggaaagcccctaagctcctgatctatgaagcatccaaactggcatctggggtcccatcaaggttcagcggcagtggatctgggacagagttcactctcaccatcagcagcctgcagcctgatgattttgcaacttattactgccaaggctatttttattttattagtcgtacttatgtaaattctttcggcggagggaccaaggtggagatcaaaggcggtggcggtagtgggggaggcggttctggcggcggagggtccggcggtggaggatcagaggtgcagctggtggagtctgggggaggcttggtccagcctggggggtccctgagactctcctgtgcagcctctggattcaccatcagtaccaatgcaatgagctgggtccgccaggctccagggaaggggctggagtggatcggagtcattactggtcgtgatatcacatactacgcgagctgggcgaaaggcagattcaccatctccagagacaattccaagaacacgctgtatcttcaaatgaacagcctgagagccgaggacacggctgtgtattactgtgcgcgcgacggtggatcatctgctattactagtaacaacatttggggccaaggaactctggtcaccgtttcttcaggcggtggagggtccggcggtggtggatccgaggtgcagctggtgcagtctggagcagaggtgaagaaaccaggagagtctctgaagatctcctgtaagggttctggatacagctttagcagttcatggatcggctgggtgcgccaggcacctgggaaaggcctggaatggatggggatcatctatcctgatgactctgataccagatacagtccatccttccaaggccaggtcaccatctcagccgacaagtccatcaggactgcctacctgcagtggagtagcctgaaggcctcggacaccgctatgtattactgtgcgagacatgttactatgatttggggagttattattgacttctggggccagggaaccctggtcaccgtctcctcagctagcaccaagggcccatcggtcttccccctggcaccctcctccaagagcacctctgggggcacagcggccctgggctgcctggtcaaggactacttccccgaaccggtgacggtgtcgtggaactcaggcgccctgaccagcggcgtgcacaccttcccggctgtcctacagtcctcaggactctactccctcagcagcgtggtgaccgtgccctccagcagcttgggcacccagacctacatctgcaacgtgaatcacaagcccagcaacaccaaggtggacaagagagttgagcccaaatcttgtgacaaaactcacacatgcccaccgtgcccagcacctgaagccgcgggggcaccgtcagtcttcctcttccccccaaaacccaaggacaccctcatgatctcccggacccctgaggtcacatgcgtggtggtggacgtgagccacgaagaccctgaggtcaagttcaactggtacgtggacggcgtggaggtgcataatgccaagacaaagccgcgggaggagcagtacaacagcacgtaccgtgtggtcagcgtcctcaccgtcctgcaccaggactggctgaatggcaaggagtacaagtgcgcggtctccaacaaagccctcccagcccccatcgagaaaaccatctccaaagccaaagggcagccccgagaaccacaggtgtataccctgcccccatcccgggatgagctgaccaagaaccaggtcagcctgacctgcctggtcaaaggcttctatcccagcgacatcgccgtggagtgggagagcaatgggcagccggagaacaactacaagaccacgcctcccgtgctggactccgacggctccttcttcctctatagcaagctcaccgtggacaagagcaggtggcagcaggggaacgtcttctcatgctccgtgatgcatgaggctctgcacaaccactacacgcagaagagcctctccctgtctccgggtggcggtggagggtccggcggtggtggatccgaggtgcagctgttggagtctgggggaggcttggtacagcctggggggtccctgagactctcctgtgcagcctctggattctccttcagtagcgggtacgacatgtgctgggtccgccaggctccagggaaggggctggagtggatcgcatgcattgctgctggtagtgctggtatcacttacgacgcgaactgggcgaaaggccggttcaccatctccagagacaattccaagaacacgctgtatctgcaaatgaacagcctgagagccgaggacacggccgtatattactgtgcgagatcggcgttttcgttcgactacgccatggacctctggggccagggaaccctggtcaccgtctcgagcggtggaggcggatctggcggaggtggttccggcggtggcggctccggtggaggcggctctgacatccagatgacccagtctccttccaccctgtctgcatctgtaggagacagagtcaccatcacttgccaggccagtcagagcattagttcccacttaaactggtatcagcagaaaccagggaaagcccctaagctcctgatctataaggcatccactctggcatctggggtcccatcaaggttcagcggcagtggatctgggacagaatttactctcaccatcagcagcctgcagcctgatgattttgcaacttattactgccaacagggttatagttggggtaatgttgataatgttttcggcggagggaccaaggtggagatcaaaggcggtggagggtccggcggtggtggatcccggtcgctggtggagtctgggggaggcttggtccagcctggggggtccctgagactctcctgtacagcctctggattcaccatcagtagctaccacatgcagtgggtccgccaggctccagggaaggggctggagtacatcggaaccattagtagtggtggtaatgtatactacgcgagctccgcgagaggcagattcaccatctccagaccctcgtccaagaacacggtggatcttcaaatgaacagcctgagagccgaggacacggctgtgtattactgtgcgagagactctggttatagtgatcctatgtggggccagggaaccctggtcaccgtctcgagcggcggtggcggtagtgggggaggcggttctggcggcggagggtccggcggtggaggatcagacgttgtgatgacccagtctccatcttccgtgtctgcatctgtaggagacagagtcaccatcacctgtcaggccagtcagaacattaggacttacttatcctggtatcagcagaaaccagggaaagcccctaagctcctgatctatgctgcagccaatctggcatctggggtcccatcaaggttcagcggcagtggatctgggacagatttcactctcaccatcagcgacctggagcctggcgatgctgcaacttactattgtcagtctacctatcttggtactgattatgttggcggtgctttcggcggagggaccaaggtggagatcaaataa

SEQ ID NO: 90 - protein, 1230 aa, Artificial Sequence
  Synthesized
DVVMTQSPSTLSASVGDRVTINCQASESISSWLAWYQQKPGKAPKLLIYEASKLASGVPSRFSGSGSGTEFTLTISSLQPDDFATYYCQGYFYFISRTYVNSFGGGTKVEIKGGGGSGGGGSGGGGSGGGGSEVQLVESGGGLVQPGGSLRLSCAASGFTISTNAMSWVRQAPGKGLEWIGVITGRDITYYASWAKGRFTISRDNSKNTLYLQMNSLRAEDTAVYYCARDGGSSAITSNNIWGQGTLVTVSSGGGGSGGGGSEVQLVQSGAEVKKPGESLKISCKGSGYSFSSSWIGWVRQAPGKGLEWMGIIYPDDSDTRYSPSFQGQVTISADKSIRTAYLQWSSLKASDTAMYYCARHVTMIWGVIIDFWGQGTLVTVSSASTKGPSVFPLAPSSKSTSGGTAALGCLVKDYFPEPVTVSWNSGALTSGVHTFPAVLQSSGLYSLSSVVTVPSSSLGTQTYICNVNHKPSNTKVDKRVEPKSCDKTHTCPPCPAPEAAGAPSVFLFPPKPKDTLMISRTPEVTCVVVDVSHEDPEVKFNWYVDGVEVHNAKTKPREEQYNSTYRVVSVLTVLHQDWLNGKEYKCAVSNKALPAPIEKTISKAKGQPREPQVYTLPPSRDELTKNQVSLTCLVKGFYPSDIAVEWESNGQPENNYKTTPPVLDSDGSFFLYSKLTVDKSRWQQGNVFSCSVMHEALHNHYTQKSLSLSPGGGGGSGGGGSEVQLLESGGGLVQPGGSLRLSCAASGFSFSSGYDMCWVRQAPGKGLEWIACIAAGSAGITYDANWAKGRFTISRDNSKNTLYLQMNSLRAEDTAVYYCARSAFSFDYAMDLWGQGTLVTVSSGGGGSGGGGSGGGGSGGGGSDIQMTQSPSTLSASVGDRVTITCQASQSISSHLNWYQQKPGKAPKLLIYKASTLASGVPSRFSGSGSGTEFTLTISSLQPDDFATYYCQQGYSWGNVDNVFGGGTKVEIKGGGGSGGGGSRSLVESGGGLVQPGGSLRLSCTASGFTISSYHMQWVRQAPGKGLEYIGTISSGGNVYYASSARGRFTISRPSSKNTVDLQMNSLRAEDTAVYYCARDSGYSDPMWGQGTLVTVSSGGGGSGGGGSGGGGSGGGGSDVVMTQSPSSVSASVGDRVTITCQASQNIRTYLSWYQQKPGKAPKLLIYAAANLASGVPSRFSGSGSGTDFTLTISDLEPGDAATYYCQSTYLGTDYVGGAFGGGTKVEIK

SEQ ID NO: 91 - DNA, 645 bp, Artificial Sequence
  Synthesized
gccatccagttgacccagtctccatcctccctgtctgcatctgtaggagacagagtcaccatcacttgccgggcaagtcagggcattagcagtgctttagcctggtatcagcagaaaccagggaaagctcctaagctcctgatctatgatgcctccagtttggaaagtggggtcccatcaaggttcagcggcagtggatctgggacagatttcactctcaccatcagcagcctgcagcctgaagattttgcaacttattactgtcaacagtttaatagttacccattcactttcggccctgggaccaaagtggatatcaaacgtacggtggctgcaccatctgtcttcatcttcccgccatctgatgagcagttgaaatctggaactgcctctgttgtgtgcctgctgaataacttctatcccagagaggccaaagtacagtggaaggtggataacgccctccaatcgggtaactcccaggagagtgtcacagagcaggacagcaaggacagcacctacagcctcagcagcaccctgacgctgagcaaagcagactacgagaaacacaaagtctacgcctgcgaagtcacccatcagggcctgagctcgcccgtcacaaagagcttcaacaggggagagtgttag

SEQ ID NO: 92 - protein, 214 aa, Artificial Sequence
  Synthesized
AIQLTQSPSSLSASVGDRVTITCRASQGISSALAWYQQKPGKAPKLLIYDASSLESGVPSRFSGSGSGTDFTLTISSLQPEDFATYYCQQFNSYPFTFGPGTKVDIKRTVAAPSVFIFPPSDEQLKSGTASVVCLLNNFYPREAKVQWKVDNALQSGNSQESVTEQDSKDSTYSLSSTLTLSKADYEKHKVYACEVTHQGLSSPVTKSFNRGEC

SEQ ID NO: 93 - DNA, 3705 bp, Artificial Sequence
  Synthesized
gaaatcgtccttacacaatctcctagcacactgagtgtgagccccggcgaacgcgcgactttctcttgcagggcaagtcaatccatagggactaatatacattggtatcaacaaaagccaggtaaaccacccaggcttttgattaagtatgcaagtgagtctatttccggtatccctgaccgcttctctggatcaggcagtggcacagagttcacactcaccatatctagtgtgcaatcagaggacttcgccgtgtattactgccaacagaataataactggccgactaccttcggacccggtacaaagctgaccgttttaggcggtggcggtagtgggggaggcggttctggcggcggagggtccggcggtggaggatcacaagtacagttgcagcaatccggtcccggtctcgtcaaaccgagtgagacgcttagtataacgtgtactgtttcaggctttagccttacgaactatggagttcactggattcggcaggcacccggcaaaggtttggaatggctgggtgttatttggtcaggtggaaatacagactataacaccccctttacaagtcggttcacaattacgaaagataattccaaaaatcaagtttatttcaagttgagatccgtccgcgcggacgacactgcgatctactattgtgcgagggcactgacctactacgattacgaatttgcgtattgggggcaagggactcttgtaacagtctcgagcggtggaggcggatctggcggaggtggttccggcggtggcggctccggtggaggcggctctgaggtgcagctggtggagtctgggggaggcttggtccagcctggggggtccctgagactctcctgtgcagcctctggattcaccatcagtaccaatgcaatgagctgggtccgccaggctccagggaagtgtctggagtggatcggagtcattactggtcgtgatatcacatactacgcgagctgggcgaaaggcagattcaccatctccagagacaattccaagaacacgctgtatcttcaaatgaacagcctgagagccgaggacacggctgtgtattactgtgcgagagacggtggttcttctgctattactagtaacaacatttggggccagggaaccctggtcaccgtgtcctcagctagcaccaagggcccatcggtcttccccctggcaccctcctccaagagcacctctgggggcacagcggccctgggctgcctggtcaaggactacttccccgaaccggtgacggtgtcgtggaactcaggcgccctgaccagcggcgtgcacaccttcccggctgtcctacagtcctcaggactctactccctcagcagcgtggtgaccgtgccctccagcagcttgggcacccagacctacatctgcaacgtgaatcacaagcccagcaacaccaaggtggacaagagagttgagcccaaatcttgtgacaaaactcacacatgcccaccgtgcccagcacctgaagccgcgggggcaccgtcagtcttcctcttccccccaaaacccaaggacaccctcatgatctcccggacccctgaggtcacatgcgtggtggtggacgtgagccacgaagaccctgaggtcaagttcaactggtacgtggacggcgtggaggtgcataatgccaagacaaagccgcgggaggagcagtacaacagcacgtaccgtgtggtcagcgtcctcaccgtcctgcaccaggactggctgaatggcaaggagtacaagtgcgcggtctccaacaaagccctcccagcccccatcgagaaaaccatctccaaagccaaagggcagccccgagaaccacaggtgtacaccctgcccccatcccgggatgagctgaccaagaaccaggtcagcctgacctgcctggtcaaaggcttctatcccagcgacatcgccgtggagtgggagagcaatgggcagccggagaacaactacaagaccacgcctcccgtgctggactccgacggctccttcttcctctatagcaagctcaccgtggacaagagcaggtggcagcaggggaacgtcttctcatgctccgtgatgcatgaggctctgcacaaccactacacgcagaagagcctctccctgtctccgggtggcggtggagggtccggcggtggtggatccgaggtgcagctgttggagtctgggggaggcttggtacagcctggggggtccctgagactctcctgtgcagcctctggattctccttcagtagcgggtacgacatgtgctgggtccgccaggctccagggaaggggctggagtggatcgcatgcattgctgctggtagtgctggtatcacttacgacgcgaactgggcgaaaggccggttcaccatctccagagacaattccaagaacacgctgtatctgcaaatgaacagcctgagagccgaggacacggccgtatattactgtgcgagatcggcgttttcgttcgactacgccatggacctctggggccagggaaccctggtcaccgtgtcgagcggtggaggcggatctggcggaggtggttccggcggtggcggctccggtggaggcggctctgacatccagatgacccagtctccttccaccctgtctgcatctgtaggagacagagtcaccatcacttgccaggccagtcagagcattagttcccacttaaactggtatcagcagaaaccagggaaagcccctaagctcctgatctataaggcatccactctggcatctggggtcccatcaaggttcagcggcagtggatctgggacagaatttactctcaccatcagcagcctgcagcctgatgattttgcaacttattactgccaacagggttatagttggggtaatgttgataatgttttcggcggagggaccaaggtggagatcaaaggcggtggagggtccggcggtggtggctccggacggtcgctggtggagtctgggggaggcttggtccagcctggggggtccctgagactctcctgtactgcctctggattcaccatcagtagctaccacatgcagtgggtccgccaggctccagggaaggggctggagtacatcggaaccattagtagtggtggtaatgtatactacgcaagctccgctagaggcagattcaccatctccagaccctcgtccaagaacacggtggatcttcaaatgaacagcctgagagccgaggacacggctgtgtattactgtgcgagagactctggttatagtgatcctatgtggggccagggaaccctggtcaccgtctcttcaggcggtggcggtagtgggggaggcggttctggcggcggagggtccggcggtggaggatcagacgttgtgatgacccagtctccatcttccgtgtctgcatctgtaggagacagagtcaccatcacctgtcaggccagtcagaacattaggacttacttatcctggtatcagcagaaaccagggaaagcccctaagctcctgatctatgctgcagccaatctggcatctggggtcccatcaaggttcagcggcagtggatctgggacagatttcactctcaccatcagcgacctggagcctggcgatgctgcaacttactattgtcagtctacctatcttggtactgattatgttggcggtgctttcggcggagggaccaaggtggagatcaaatga

SEQ ID NO: 94 - protein, 1234 aa, Artificial Sequence
  Synthesized
EIVLTQSPSTLSVSPGERATFSCRASQSIGTNIHWYQQKPGKPPRLLIKYASESISGIPDRFSGSGSGTEFTLTISSVQSEDFAVYYCQQNNNWPTTFGPGTKLTVLGGGGSGGGGSGGGGSGGGGSQVQLQQSGPGLVKPSETLSITCTVSGFSLTNYGVHWIRQAPGKGLEWLGVIWSGGNTDYNTPFTSRFTITKDNSKNQVYFKLRSVRADDTAIYYCARALTYYDYEFAYWGQGTLVTVSSGGGGSGGGGSGGGGSGGGGSEVQLVESGGGLVQPGGSLRLSCAASGFTISTNAMSWVRQAPGKCLEWIGVITGRDITYYASWAKGRFTISRDNSKNTLYLQMNSLRAEDTAVYYCARDGGSSAITSNNIWGQGTLVTVSSASTKGPSVFPLAPSSKSTSGGTAALGCLVKDYFPEPVTVSWNSGALTSGVHTFPAVLQSSGLYSLSSVVTVPSSSLGTQTYICNVNHKPSNTKVDKRVEPKSCDKTHTCPPCPAPEAAGAPSVFLFPPKPKDTLMISRTPEVTCVVVDVSHEDPEVKFNWYVDGVEVHNAKTKPREEQYNSTYRVVSVLTVLHQDWLNGKEYKCAVSNKALPAPIEKTISKAKGQPREPQVYTLPPSRDELTKNQVSLTCLVKGFYPSDIAVEWESNGQPENNYKTTPPVLDSDGSFFLYSKLTVDKSRWQQGNVFSCSVMHEALHNHYTQKSLSLSPGGGGGSGGGGSEVQLLESGGGLVQPGGSLRLSCAASGFSFSSGYDMCWVRQAPGKGLEWIACIAAGSAGITYDANWAKGRFTISRDNSKNTLYLQMNSLRAEDTAVYYCARSAFSFDYAMDLWGQGTLVTVSSGGGGSGGGGSGGGGSGGGGSDIQMTQSPSTLSASVGDRVTITCQASQSISSHLNWYQQKPGKAPKLLIYKASTLASGVPSRFSGSGSGTEFTLTISSLQPDDFATYYCQQGYSWGNVDNVFGGGTKVEIKGGGGSGGGGSGRSLVESGGGLVQPGGSLRLSCTASGFTISSYHMQWVRQAPGKGLEYIGTISSGGNVYYASSARGRFTISRPSSKNTVDLQMNSLRAEDTAVYYCARDSGYSDPMWGQGTLVTVSSGGGGSGGGGSGGGGSGGGGSDVVMTQSPSSVSASVGDRVTITCQASQNIRTYLSWYQQKPGKAPKLLIYAAANLASGVPSRFSGSGSGTDFTLTISDLEPGDAATYYCQSTYLGTDYVGGAFGGGTKVEIK

SEQ ID NO: 95 - DNA, 2220 bp, Artificial Sequence
  Synthesized
gaaaatgtattgacacagagccccgcctccctcagtgcctcacctggggaaagggtaactatcacttgctctgcatcaagcagcgtctcatacatgcattggtatcaacaaaagcctggacaggcccccaagctctggatatacgatacgagcaagctggcttccggcgtacctagccgcttcagtggttccggctcaggcaacgatcacacccttacgatttccagtatggaacccgaagattttgcaacttattattgtttccaggggagcgtgtacccattcactttcgggcaggggacaaaagtgaccgtcctaggcggtggcggtagtgggggaggcggttctggcggcggagggtccggcggtggaggatcacaggtcacattgaaggaatctggccccggccttgttcagccaggacagacccttagcctcacctgtgccttcagtggtttttctcttagcactagcggtatgggggtcggctggattcggcagcctcccggcaaaggtcttgagtggttggctcacatttggtgggacgacgacaaacggtataatcctgccttgaaaagtcggctgaccattagtaaggatacctcaaaaaatcaagtgtacttgcaaatgaatagccttgacgccgaggatacggctgtatattattgcgctcggatggaactctggtcttactactttgattattgggggcaggggactctcgtcacggtctcgagtggcggtggagggtccggcggtggtggatcagacgtcgtgatgacccagtctccttccaccctgtctgcatctgtaggagacagagtcaccatcaattgccaagccagtgagagcattagcagttggttagcctggtatcagcagaaaccagggaaagcccctaagctcctgatctatgaagcatccaaactggcatctggggtcccatcaaggttcagcggcagtggatctgggacagaatttactctcaccatcagcagcctgcagcctgatgattttgcaacttattactgccaaggctatttttattttattagtcgtacttatgtaaattctttcggctgtgggaccaaggtggagatcaaacgtacggtggctgcaccatctgtcttcatcttcccgccatctgatgagcagttgaaatctggaactgcctctgttgtgtgcctgctgaataacttctatcccagagaggccaaagtacagtggaaggtggataacgccctccaatcgggtaactcccaggagagtgtcacagagcaggacagcaaggacagcacctacagcctcagcagcaccctgacgctgagcaaagcagactacgagaaacacaaagtctacgcctgcgaagtcacccatcagggcctgagctcgcccgtcacaaagagcttcaacaggggagagtgtggcggtggcggtagcggtggcggcggaagtggtggcggaggatcccagtctgccctgactcagcctgcctccgtgtctgggtctcctggacagtcgatcaccatctcctgcactggaaccagcagtgacgttggtggttataactttgtctcctggtaccaacaacacccaggcaaagcccccaaactcatgatctatgatgtcagtgatcggccctcaggggtgtctgatcgcttctccggctccaagtctggcaacacggcctccctgatcatctctggcctccaggctgacgacgaggctgattattactgcagctcatatgggagcagcagcactcatgtgattttcggcggagggaccaaggtgaccgtcctaggtggaggcggttcaggcggaggtggttccggcggtggcggctccggtggaggcggctctcaggtgcaattgcaggagtcggggggaggcctggtcaagcctggagggtccctgagtctctcctgtgcagcctctggattcacctttagtagttattggatgagctgggtccgccaggctccagggaaggggctggagtgggtggccaacataaaccgcgatggaagtgcgagttactatgtggactctgtgaagggccgattcaccatctccagagacgacgccaagaactcactgtatctgcaaatgaacagcctgagagctgaggacacggctgtgtattactgtgcgagagatcgtggggtgggctacttcgatctctggggccgtggcaccctggtcaccgtctctagctga

SEQ ID NO: 96 - protein, 739 aa, Artificial Sequence
  Synthesized
ENVLTQSPASLSASPGERVTITCSASSSVSYMHWYQQKPGQAPKLWIYDTSKLASGVPSRFSGSGSGNDHTLTISSMEPEDFATYYCFQGSVYPFTFGQGTKVTVLGGGGSGGGGSGGGGSGGGGSQVTLKESGPGLVQPGQTLSLTCAFSGFSLSTSGMGVGWIRQPPGKGLEWLAHIWWDDDKRYNPALKSRLTISKDTSKNQVYLQMNSLDAEDTAVYYCARMELWSYYFDYWGQGTLVTVSSGGGGSGGGGSDVVMTQSPSTLSASVGDRVTINCQASESISSWLAWYQQKPGKAPKLLIYEASKLASGVPSRFSGSGSGTEFTLTISSLQPDDFATYYCQGYFYFISRTYVNSFGCGTKVEIKRTVAAPSVFIFPPSDEQLKSGTASVVCLLNNFYPREAKVQWKVDNALQSGNSQESVTEQDSKDSTYSLSSTLTLSKADYEKHKVYACEVTHQGLSSPVTKSFNRGECGGGGSGGGGSGGGGSQSALTQPASVSGSPGQSITISCTGTSSDVGGYNFVSWYQQHPGKAPKLMIYDVSDRPSGVSDRFSGSKSGNTASLIISGLQADDEADYYCSSYGSSSTHVIFGGGTKVTVLGGGGSGGGGSGGGGSGGGGSQVQLQESGGGLVKPGGSLSLSCAASGFTFSSYWMSWVRQAPGKGLEWVANINRDGSASYYVDSVKGRFTISRDDAKNSLYLQMNSLRAEDTAVYYCARDRGVGYFDLWGRGTLVTVSS

SEQ ID NO: 97 - DNA, 3693 bp, Artificial Sequence
  Synthesized
gacgtcgtgatgacccagtctccttccaccctgtctgcatctgtaggagacagagtcaccatcaattgccaagccagtgagagcattagcagttggttagcctggtatcagcagaaaccagggaaagcccctaagctcctgatctatgaagcatccaaactggcatctggggtcccatcaaggttcagcggcagtggatctgggacagaatttactctcaccatcagcagcctgcagcctgatgattttgcaacttattactgccaaggctatttttattttattagtcgtacttatgtaaattctttcggcggagggaccaaggtggagatcaaaggcggtggcggtagtgggggaggcggttctggcggcggagggtccggcggtggaggatcagaggtgcagctggtggagtctgggggaggcttggtccagcctggggggtccctgagactctcctgtgcagcctctggattcaccatcagtaccaatgcaatgagctgggtccgccaggctccagggaaggggctggagtggatcggagtcattactggtcgtgatatcacatactacgcgagctgggcgaaaggcagattcaccatctccagagacaattccaagaacacgctgtatcttcaaatgaacagcctgagagccgaggacacggctgtgtattactgtgcgagagacggtggttcttctgctattactagtaacaacatttggggccagggaaccctggtcaccgtgtcgacaggcggtggagggtccggcggtggtggatcagaggttcagctggtggagtctggcggtggcctggtgcagccagggggctcactccgtttgtcctgtgcagcttctggcttcaacattaaagacacctatatacactgggtgcgtcaggccccgggtaagggcctggaatgggttgcaaggatttatcctacgaatggttatactagatatgccgatagcgtcaagggccgtttcactataagcgcagacacatccaaaaacacagcctacctgcagatgaacagcctgcgtgctgaggacactgccgtctattattgttctagatggggaggggacggcttctatgctatggactactggggtcaaggaaccctggtcaccgtctcctcggctagcaccaagggcccatcggtcttccccctggcaccctcctccaagagcacctctgggggcacagcggccctgggctgcctggtcaaggactacttccccgaaccggtgacggtgtcgtggaactcaggcgccctgaccagcggcgtgcacaccttcccggctgtcctacagtcctcaggactctactccctcagcagcgtggtgaccgtgccctccagcagcttgggcacccagacctacatctgcaacgtgaatcacaagcccagcaacaccaaggtggacaagagagttgagcccaaatcttgtgacaaaactcacacatgcccaccgtgcccagcacctgaagccgcgggggcaccgtcagtcttcctcttccccccaaaacccaaggacaccctcatgatctcccggacccctgaggtcacatgcgtggtggtggacgtgagccacgaagaccctgaggtcaagttcaactggtacgtggacggcgtggaggtgcataatgccaagacaaagccgcgggaggagcagtacaacagcacgtaccgtgtggtcagcgtcctcaccgtcctgcaccaggactggctgaatggcaaggagtacaagtgcgcggtctccaacaaagccctcccagcccccatcgagaaaaccatctccaaagccaaagggcagccccgagaaccacaggtgtacaccctgcccccatcccgggatgagctgaccaagaaccaggtcagcctgacctgcctggtcaaaggcttctatcccagcgacatcgccgtggagtgggagagcaatgggcagccggagaacaactacaagaccacgcctcccgtgctggactccgacggctccttcttcctctatagcaagctcaccgtggacaagagcaggtggcagcaggggaacgtcttctcatgctccgtgatgcatgaggctctgcacaaccactacacgcagaagagcctctccctgtctccgggtggcggtggagggtccggcggtggtggatccgaggtgcagctgttggagtctgggggaggcttggtacagcctggggggtccctgagactctcctgtgcagcctctggattctccttcagtagcgggtacgacatgtgctgggtccgccaggctccagggaaggggctggagtggatcgcatgcattgctgctggtagtgctggtatcacttacgacgcgaactgggcgaaaggccggttcaccatctccagagacaattccaagaacacgctgtatctgcaaatgaacagcctgagagccgaggacacggccgtatattactgtgcgagatcggcgttttcgttcgactacgccatggacctctggggccagggaaccctggtcaccgtctcgagcggtggaggcggatctggcggaggtggttccggcggtggcggctccggtggaggcggctctgacatccagatgacccagtctccttccaccctgtctgcatctgtaggagacagagtcaccatcacttgccaggccagtcagagcattagttcccacttaaactggtatcagcagaaaccagggaaagcccctaagctcctgatctataaggcatccactctggcatctggggtcccatcaaggttcagcggcagtggatctgggacagaatttactctcaccatcagcagcctgcagcctgatgattttgcaacttattactgccaacagggttatagttggggtaatgttgataatgttttcggcggagggaccaaggtggagatcaaaggcggtggagggtccggcggtggtggctccggacggtcgctggtggagtctgggggaggcttggtccagcctggggggtccctgagactctcctgtactgcctctggattcaccatcagtagctaccacatgcagtgggtccgccaggctccagggaaggggctggagtacatcggaaccattagtagtggtggtaatgtatactacgcaagctccgctagaggcagattcaccatctccagaccctcgtccaagaacacggtggatcttcaaatgaacagcctgagagccgaggacacggctgtgtattactgtgcgagagactctggttatagtgatcctatgtggggccagggaaccctggtcaccgtctcttcaggcggtggcggtagtgggggaggcggttctggcggcggagggtccggcggtggaggatcagacgttgtgatgacccagtctccatcttccgtgtctgcatctgtaggagacagagtcaccatcacctgtcaggccagtcagaacattaggacttacttatcctggtatcagcagaaaccagggaaagcccctaagctcctgatctatgctgcagccaatctggcatctggggtcccatcaaggttcagcggcagtggatctgggacagatttcactctcaccatcagcgacctggagcctggcgatgctgcaacttactattgtcagtctacctatcttggtactgattatgttggcggtgctttcggcggagggaccaaggtggagatcaaatga

SEQ ID NO: 98 - protein, 1230 aa, Artificial Sequence
  Synthesized
DVVMTQSPSTLSASVGDRVTINCQASESISSWLAWYQQKPGKAPKLLIYEASKLASGVPSRFSGSGSGTEFTLTISSLQPDDFATYYCQGYFYFISRTYVNSFGGGTKVEIKGGGGSGGGGSGGGGSGGGGSEVQLVESGGGLVQPGGSLRLSCAASGFTISTNAMSWVRQAPGKGLEWIGVITGRDITYYASWAKGRFTISRDNSKNTLYLQMNSLRAEDTAVYYCARDGGSSAITSNNIWGQGTLVTVSTGGGGSGGGGSEVQLVESGGGLVQPGGSLRLSCAASGFNIKDTYIHWVRQAPGKGLEWVARIYPTNGYTRYADSVKGRFTISADTSKNTAYLQMNSLRAEDTAVYYCSRWGGDGFYAMDYWGQGTLVTVSSASTKGPSVFPLAPSSKSTSGGTAALGCLVKDYFPEPVTVSWNSGALTSGVHTFPAVLQSSGLYSLSSVVTVPSSSLGTQTYICNVNHKPSNTKVDKRVEPKSCDKTHTCPPCPAPEAAGAPSVFLFPPKPKDTLMISRTPEVTCVVVDVSHEDPEVKFNWYVDGVEVHNAKTKPREEQYNSTYRVVSVLTVLHQDWLNGKEYKCAVSNKALPAPIEKTISKAKGQPREPQVYTLPPSRDELTKNQVSLTCLVKGFYPSDIAVEWESNGQPENNYKTTPPVLDSDGSFFLYSKLTVDKSRWQQGNVFSCSVMHEALHNHYTQKSLSLSPGGGGGSGGGGSEVQLLESGGGLVQPGGSLRLSCAASGFSFSSGYDMCWVRQAPGKGLEWIACIAAGSAGITYDANWAKGRFTISRDNSKNTLYLQMNSLRAEDTAVYYCARSAFSFDYAMDLWGQGTLVTVSSGGGGSGGGGSGGGGSGGGGSDIQMTQSPSTLSASVGDRVTITCQASQSISSHLNWYQQKPGKAPKLLIYKASTLASGVPSRFSGSGSGTEFTLTISSLQPDDFATYYCQQGYSWGNVDNVFGGGTKVEIKGGGGSGGGGSGRSLVESGGGLVQPGGSLRLSCTASGFTISSYHMQWVRQAPGKGLEYIGTISSGGNVYYASSARGRFTISRPSSKNTVDLQMNSLRAEDTAVYYCARDSGYSDPMWGQGTLVTVSSGGGGSGGGGSGGGGSGGGGSDVVMTQSPSSVSASVGDRVTITCQASQNIRTYLSWYQQKPGKAPKLLIYAAANLASGVPSRFSGSGSGTDFTLTISDLEPGDAATYYCQSTYLGTDYVGGAFGGGTKVEIK

SEQ ID NO: 99 - DNA, 645 bp, Artificial Sequence
  Synthesized
gatatccagatgacccagtccccgagctccctgtccgcctctgtgggcgatagggtcaccatcacctgccgtgccagtcaggatgtgaatactgctgtagcctggtatcaacagaaaccaggaaaagctccgaaactactgatttactcggcatccttcctctactctggagtcccttctcgcttctctggctccagatctgggacggatttcactctgaccatcagcagtctgcagccggaagacttcgcaacttattactgtcagcaacattatactactcctcccacgttcggacagggtaccaaggtggagatcaaacgtacggtggctgcaccatctgtcttcatcttcccgccatctgatgagcagttgaaatctggaactgcctctgttgtgtgcctgctgaataacttctatcccagagaggccaaagtacagtggaaggtggataacgccctccaatcgggtaactcccaggagagtgtcacagagcaggacagcaaggacagcacctacagcctcagcagcaccctgacgctgagcaaagcagactacgagaaacacaaagtctacgcctgcgaagtcacccatcagggcctgagctcgcccgtcacaaagagcttcaacaggggagagtgttag

SEQ ID NO: 100 - protein, 214 aa, Artificial Sequence
  Synthesized
DIQMTQSPSSLSASVGDRVTITCRASQDVNTAVAWYQQKPGKAPKLLIYSASFLYSGVPSRFSGSRSGTDFTLTISSLQPEDFATYYCQQHYTTPPTFGQGTKVEIKRTVAAPSVFIFPPSDEQLKSGTASVVCLLNNFYPREAKVQWKVDNALQSGNSQESVTEQDSKDSTYSLSSTLTLSKADYEKHKVYACEVTHQGLSSPVTKSFNRGEC

SEQ ID NO: 101 - DNA, 3693 bp, Artificial Sequence
  Synthesized
gacgtcgtgatgacccagtctccttccaccctgtctgcatctgtaggagacagagtcaccatcaattgccaagccagtgagagcattagcagttggttagcctggtatcagcagaaaccagggaaagcccctaagctcctgatctatgaagcatccaaactggcatctggggtcccatcaaggttcagcggcagtggatctgggacagaatttactctcaccatcagcagcctgcagcctgatgattttgcaacttattactgccaaggctatttttattttattagtcgtacttatgtaaattctttcggctgtgggaccaaggtggagatcaaaggtggaggcggttcaggcggaggtggaagtggtggtggcggctctggaggcggcggatctgaggtgcagctggtggagtctgggggaggcttggtccagcctggggggtccctgagactctcctgtgcagcctctggattcaccatcagtaccaatgcaatgagctgggtccgccaggctccagggaagtgcctggagtggatcggagtcattactggtcgtgatatcacatactacgcgagctgggcgaaaggcagattcaccatctccagagacaattccaagaacacgctgtatcttcaaatgaacagcctgagagccgaggacacggctgtgtattactgtgcgagagacggtggttcttctgctattactagtaacaacatttggggccagggaaccctggtcaccgtgtcgacaggcggtggagggtccggcggtggtggatcagaggttcagctggtggagtctggcggtggcctggtgcagccagggggctcactccgtttgtcctgtgcagcttctggcttcaacattaaagacacctatatacactgggtgcgtcaggccccgggtaagggcctggaatgggttgcaaggatttatcctacgaatggttatactagatatgccgatagcgtcaagggccgtttcactataagcgcagacacatccaaaaacacagcctacctgcagatgaacagcctgcgtgctgaggacactgccgtctattattgttctagatggggaggggacggcttctatgctatggactactggggtcaaggaaccctggtcaccgtctcctcggctagcaccaagggcccatcggtcttccccctggcaccctcctccaagagcacctctgggggcacagcggccctgggctgcctggtcaaggactacttccccgaaccggtgacggtgtcgtggaactcaggcgccctgaccagcggcgtgcacaccttcccggctgtcctacagtcctcaggactctactccctcagcagcgtggtgaccgtgccctccagcagcttgggcacccagacctacatctgcaacgtgaatcacaagcccagcaacaccaaggtggacaagagagttgagcccaaatcttgtgacaaaactcacacatgcccaccgtgcccagcacctgaagccgcggggggaccgtcagtcttcctcttccccccaaaacccaaggacaccctcatgatctcccggacccctgaggtcacatgcgtggtggtggacgtgagccacgaagaccctgaggtcaagttcaactggtacgtggacggcgtggaggtgcataatgccaagacaaagccgcgggaggagcagtacgccagcacgtaccgtgtggtcagcgtcctcaccgtcctgcaccaggactggctgaatggcaaggagtacaagtgcgcggtctccaacaaagccctcccagcccccatcgagaaaaccatctccaaagccaaagggcagccccgagaaccacaggtgtacaccctgcccccatcccgggatgagctgaccaagaaccaggtcagcctgacctgcctggtcaaaggcttctatcccagcgacatcgccgtggagtgggagagcaatgggcagccggagaacaactacaagaccacgcctcccgtgctggactccgacggctccttcttcctctatagcaagctcaccgtggacaagagcaggtggcagcaggggaacgtcttctcatgctccgtgatgcatgaggctctgcacaaccactacacgcagaagagcctctccctgtctccgggtggcggtggagggtccggcggtggtggatccgaggtgcagctgttggagtctgggggaggcttggtacagcctggggggtccctgagactctcctgtgcagcctctggattctccttcagtagcgggtacgacatgtgctgggtccgccaggctccagggaagtgcctggagtggatcgcatgcattgctgctggtagtgctggtatcacttacgacgcgaactgggcgaaaggccggttcaccatctccagagacaattccaagaacacgctgtatctgcaaatgaacagcctgagagccgaggacacggccgtatattactgtgcgagatcggcgttttcgttcgactacgccatggacctctggggccagggaaccctggtcaccgtctcgagcggtggaggcggttcaggcggaggtggaagtggtggtggcggctctggaggcggcggatctgacatccagatgacccagtctccttccaccctgtctgcatctgtaggagacagagtcaccatcacttgccaggccagtcagagcattagttcccacttaaactggtatcagcagaaaccagggaaagcccctaagctcctgatctataaggcatccactctggcatctggggtcccatcaaggttcagcggcagtggatctgggacagaatttactctcaccatcagcagcctgcagcctgatgattttgcaacttattactgccaacagggttatagttggggtaatgttgataatgttttcggctgcgggaccaaggtggagatcaaaggtggtggcggctctggaggaggagggtccggacggtcgctggtggagtctgggggaggcttggtccagcctggggggtccctgagactctcctgtactgcctctggattcaccatcagtagctaccacatgcagtgggtccggcaggcacctgggaagtgcctggagtacatcggaaccattagtagtggtggtaatgtatactacgcaagctccgctagaggcagattcaccatctccagaccctcgtccaagaacacggtggatcttcaaatgaacagcctgagagccgaggacacggctgtgtattactgtgcgagagactctggttatagtgatcctatgtggggccagggaaccctggtcaccgtctcttcaggcggtggcggtagtgggggaggcggttctggcggcggagggtccggcggtggaggatcagacgttgtgatgacccagtctccatcttccgtgtctgcatctgtaggagacagagtcaccatcacctgtcaggccagtcagaacattaggacttacttatcctggtatcagcagaaaccagggaaagcccctaagctcctgatctatgctgcagccaatctggcatctggggtcccatcaaggttcagcggcagtggatctgggacagatttcactctcaccatcagcgacttggaacctggcgatgctgcaacttactattgtcagtctacctatcttggtactgattatgttggcggtgctttcggctgtgggaccaaggtggagatcaaatga

SEQ ID NO: 102 - protein, 1230 aa, Artificial Sequence
  Synthesized
DVVMTQSPSTLSASVGDRVTINCQASESISSWLAWYQQKPGKAPKLLIYEASKLASGVPSRFSGSGSGTEFTLTISSLQPDDFATYYCQGYFYFISRTYVNSFGCGTKVEIKGGGGSGGGGSGGGGSGGGGSEVQLVESGGGLVQPGGSLRLSCAASGFTISTNAMSWVRQAPGKCLEWIGVITGRDITYYASWAKGRFTISRDNSKNTLYLQMNSLRAEDTAVYYCARDGGSSAITSNNIWGQGTLVTVSTGGGGSGGGGSEVQLVESGGGLVQPGGSLRLSCAASGFNIKDTYIHWVRQAPGKGLEWVARIYPTNGYTRYADSVKGRFTISADTSKNTAYLQMNSLRAEDTAVYYCSRWGGDGFYAMDYWGQGTLVTVSSASTKGPSVFPLAPSSKSTSGGTAALGCLVKDYFPEPVTVSWNSGALTSGVHTFPAVLQSSGLYSLSSVVTVPSSSLGTQTYICNVNHKPSNTKVDKRVEPKSCDKTHTCPPCPAPEAAGGPSVFLFPPKPKDTLMISRTPEVTCVVVDVSHEDPEVKFNWYVDGVEVHNAKTKPREEQYASTYRVVSVLTVLHQDWLNGKEYKCAVSNKALPAPIEKTISKAKGQPREPQVYTLPPSRDELTKNQVSLTCLVKGFYPSDIAVEWESNGQPENNYKTTPPVLDSDGSFFLYSKLTVDKSRWQQGNVFSCSVMHEALHNHYTQKSLSLSPGGGGGSGGGGSEVQLLESGGGLVQPGGSLRLSCAASGFSFSSGYDMCWVRQAPGKCLEWIACIAAGSAGITYDANWAKGRFTISRDNSKNTLYLQMNSLRAEDTAVYYCARSAFSFDYAMDLWGQGTLVTVSSGGGGSGGGGSGGGGSGGGGSDIQMTQSPSTLSASVGDRVTITCQASQSISSHLNWYQQKPGKAPKLLIYKASTLASGVPSRFSGSGSGTEFTLTISSLQPDDFATYYCQQGYSWGNVDNVFGCGTKVEIKGGGGSGGGGSGRSLVESGGGLVQPGGSLRLSCTASGFTISSYHMQWVRQAPGKCLEYIGTISSGGNVYYASSARGRFTISRPSSKNTVDLQMNSLRAEDTAVYYCARDSGYSDPMWGQGTLVTVSSGGGGSGGGGSGGGGSGGGGSDVVMTQSPSSVSASVGDRVTITCQASQNIRTYLSWYQQKPGKAPKLLIYAAANLASGVPSRFSGSGSGTDFTLTISDLEPGDAATYYCQSTYLGTDYVGGAFGCGTKVEIK

SEQ ID NO: 103 - DNA, 3690 bp, Artificial Sequence
  Synthesized
gacgtcgtgatgacccagtctccttccaccctgtctgcatctgtaggagacagagtcaccatcaattgccaagccagtgagagcattagcagttggttagcctggtatcagcagaaaccagggaaagcccctaagctcctgatctatgaagcatccaaactggcatctggggtcccatcaaggttcagcggcagtggatctgggacagaatttactctcaccatcagcagcctgcagcctgatgattttgcaacttattactgccaaggctatttttattttattagtcgtacttatgtaaattctttcggcggagggaccaaggtggagatcaaaggcggtggcggtagtgggggaggcggttctggcggcggagggtccggcggtggaggatcagaggtgcagctggtggagtctgggggaggcttggtccagcctggggggtccctgagactctcctgtgcagcctctggattcaccatcagtaccaatgcaatgagctgggtccgccaggctccagggaaggggctggagtggatcggagtcattactggtcgtgatatcacatactacgcgagctgggcgaaaggcagattcaccatctccagagacaattccaagaacacgctgtatcttcaaatgaacagcctgagagccgaggacacggctgtgtattactgtgcgagagacggtggttcttctgctattactagtaacaacatttggggccagggaaccctggtcaccgtgtcgacaggcggtggagggtccggcggtggtggatcagaagtgcagctcgtcgaaagcggtggcggactggttcagcccggtggttctctgcggctgtcttgtgctgcctcgggtttcacgttcactgactacacaatggactgggtgcgtcaggctcctggaaagggattggagtgggtagccgacgttaatccaaactccggcgggagcatctacaaccagaggttcaaggggaggttcactctgagcgtggatcgctccaagaacacgctgtacctccagatgaactctctcagggccgaggacacggctgtttactattgcgcgaggaacctgggtccttccttctacttcgactactggggacagggaaccctggtgaccgtcagctccgctagcaccaagggcccatcggtcttccccctggcaccctcctccaagagcacctctgggggcacagcggccctgggctgcctggtcaaggactacttccccgaaccggtgacggtgtcgtggaactcaggcgccctgaccagcggcgtgcacaccttcccggctgtcctacagtcctcaggactctactccctcagcagcgtggtgaccgtgccctccagcagcttgggcacccagacctacatctgcaacgtgaatcacaagcccagcaacaccaaggtggacaagagagttgagcccaaatcttgtgacaaaactcacacatgcccaccgtgcccagcacctgaagccgcgggggcaccgtcagtcttcctcttccccccaaaacccaaggacaccctcatgatctcccggacccctgaggtcacatgcgtggtggtggacgtgagccacgaagaccctgaggtcaagttcaactggtacgtggacggcgtggaggtgcataatgccaagacaaagccgcgggaggagcagtacaacagcacgtaccgtgtggtcagcgtcctcaccgtcctgcaccaggactggctgaatggcaaggagtacaagtgcgcggtctccaacaaagccctcccagcccccatcgagaaaaccatctccaaagccaaagggcagccccgagaaccacaggtgtacaccctgcccccatcccgggatgagctgaccaagaaccaggtcagcctgacctgcctggtcaaaggcttctatcccagcgacatcgccgtggagtgggagagcaatgggcagccggagaacaactacaagaccacgcctcccgtgctggactccgacggctccttcttcctctatagcaagctcaccgtggacaagagcaggtggcagcaggggaacgtcttctcatgctccgtgatgcatgaggctctgcacaaccactacacgcagaagagcctctccctgtctccgggtggcggtggagggtccggcggtggtggatccgaggtgcagctgttggagtctgggggaggcttggtacagcctggggggtccctgagactctcctgtgcagcctctggattctccttcagtagcgggtacgacatgtgctgggtccgccaggctccagggaaggggctggagtggatcgcatgcattgctgctggtagtgctggtatcacttacgacgcgaactgggcgaaaggccggttcaccatctccagagacaattccaagaacacgctgtatctgcaaatgaacagcctgagagccgaggacacggccgtatattactgtgcgagatcggcgttttcgttcgactacgccatggacctctggggccagggaaccctggtcaccgtctcgagcggtggaggcggatctggcggaggtggttccggcggtggcggctccggtggaggcggctctgacatccagatgacccagtctccttccaccctgtctgcatctgtaggagacagagtcaccatcacttgccaggccagtcagagcattagttcccacttaaactggtatcagcagaaaccagggaaagcccctaagctcctgatctataaggcatccactctggcatctggggtcccatcaaggttcagcggcagtggatctgggacagaatttactctcaccatcagcagcctgcagcctgatgattttgcaacttattactgccaacagggttatagttggggtaatgttgataatgttttcggcggagggaccaaggtggagatcaaaggcggtggagggtccggcggtggtggctccggacggtcgctggtggagtctgggggaggcttggtccagcctggggggtccctgagactctcctgtactgcctctggattcaccatcagtagctaccacatgcagtgggtccgccaggctccagggaaggggctggagtacatcggaaccattagtagtggtggtaatgtatactacgcaagctccgctagaggcagattcaccatctccagaccctcgtccaagaacacggtggatcttcaaatgaacagcctgagagccgaggacacggctgtgtattactgtgcgagagactctggttatagtgatcctatgtggggccagggaaccctggtcaccgtctcttcaggcggtggcggtagtgggggaggcggttctggcggcggagggtccggcggtggaggatcagacgttgtgatgacccagtctccatcttccgtgtctgcatctgtaggagacagagtcaccatcacctgtcaggccagtcagaacattaggacttacttatcctggtatcagcagaaaccagggaaagcccctaagctcctgatctatgctgcagccaatctggcatctggggtcccatcaaggttcagcggcagtggatctgggacagatttcactctcaccatcagcgacctggagcctggcgatgctgcaacttactattgtcagtctacctatcttggtactgattatgttggcggtgctttcggcggagggaccaaggtggagatcaaatga

SEQ ID NO: 104 - protein, 1229 aa, Artificial Sequence
  Synthesized
DVVMTQSPSTLSASVGDRVTINCQASESISSWLAWYQQKPGKAPKLLIYEASKLASGVPSRFSGSGSGTEFTLTISSLQPDDFATYYCQGYFYFISRTYVNSFGGGTKVEIKGGGGSGGGGSGGGGSGGGGSEVQLVESGGGLVQPGGSLRLSCAASGFTISTNAMSWVRQAPGKGLEWIGVITGRDITYYASWAKGRFTISRDNSKNTLYLQMNSLRAEDTAVYYCARDGGSSAITSNNIWGQGTLVTVSTGGGGSGGGGSEVQLVESGGGLVQPGGSLRLSCAASGFTFTDYTMDWVRQAPGKGLEWVADVNPNSGGSIYNQRFKGRFTLSVDRSKNTLYLQMNSLRAEDTAVYYCARNLGPSFYFDYWGQGTLVTVSSASTKGPSVFPLAPSSKSTSGGTAALGCLVKDYFPEPVTVSWNSGALTSGVHTFPAVLQSSGLYSLSSVVTVPSSSLGTQTYICNVNHKPSNTKVDKRVEPKSCDKTHTCPPCPAPEAAGAPSVFLFPPKPKDTLMISRTPEVTCVVVDVSHEDPEVKFNWYVDGVEVHNAKTKPREEQYNSTYRVVSVLTVLHQDWLNGKEYKCAVSNKALPAPIEKTISKAKGQPREPQVYTLPPSRDELTKNQVSLTCLVKGFYPSDIAVEWESNGQPENNYKTTPPVLDSDGSFFLYSKLTVDKSRWQQGNVFSCSVMHEALHNHYTQKSLSLSPGGGGGSGGGGSEVQLLESGGGLVQPGGSLRLSCAASGFSFSSGYDMCWVRQAPGKGLEWIACIAAGSAGITYDANWAKGRFTISRDNSKNTLYLQMNSLRAEDTAVYYCARSAFSFDYAMDLWGQGTLVTVSSGGGGSGGGGSGGGGSGGGGSDIQMTQSPSTLSASVGDRVTITCQASQSISSHLNWYQQKPGKAPKLLIYKASTLASGVPSRFSGSGSGTEFTLTISSLQPDDFATYYCQQGYSWGNVDNVFGGGTKVEIKGGGGSGGGGSGRSLVESGGGLVQPGGSLRLSCTASGFTISSYHMQWVRQAPGKGLEYIGTISSGGNVYYASSARGRFTISRPSSKNTVDLQMNSLRAEDTAVYYCARDSGYSDPMWGQGTLVTVSSGGGGSGGGGSGGGGSGGGGSDVVMTQSPSSVSASVGDRVTITCQASQNIRTYLSWYQQKPGKAPKLLIYAAANLASGVPSRFSGSGSGTDFTLTISDLEPGDAATYYCQSTYLGTDYVGGAFGGGTKVEIK

SEQ ID NO: 105 - DNA, 645 bp, Artificial Sequence
  Synthesized
gacatccagatgacacaatctcctagcagtctgagcgcaagtgttggagatcgtgtcaccatcacatgcaaggccagccaggatgtgagcattggagtcgcctggtatcagcagaaacccggcaaggcacccaagctgctgatctactcggccagttacagatacactggcgtaccttcgaggtttagtggtagcggttctggaaccgatttcaccctcaccattagctccctccaacccgaggacttcgccacctactactgccagcaatactacatctacccttacacgttcggccaaggcactaaggtcgagattaaacgtacggtggctgcaccatctgtcttcatcttcccgccatctgatgagcagttgaaatctggaactgcctctgttgtgtgcctgctgaataacttctatcccagagaggccaaagtacagtggaaggtggataacgccctccaatcgggtaactcccaggagagtgtcacagagcaggacagcaaggacagcacctacagcctcagcagcaccctgacgctgagcaaagcagactacgagaaacacaaagtctacgcctgcgaagtcacccatcagggcctgagctcgcccgtcacaaagagcttcaacaggggagagtgttag

SEQ ID NO: 106 - protein, 214 aa, Artificial Sequence
  Synthesized
DIQMTQSPSSLSASVGDRVTITCKASQDVSIGVAWYQQKPGKAPKLLIYSASYRYTGVPSRFSGSGSGTDFTLTISSLQPEDFATYYCQQYYIYPYTFGQGTKVEIKRTVAAPSVFIFPPSDEQLKSGTASVVCLLNNFYPREAKVQWKVDNALQSGNSQESVTEQDSKDSTYSLSSTLTLSKADYEKHKVYACEVTHQGLSSPVTKSFNRGEC

SEQ ID NO: 107 - DNA, 3690 bp, Artificial Sequence
  Synthesized
gacgtcgtgatgacccagtctccttccaccctgtctgcatctgtaggagacagagtcaccatcaattgccaagccagtgagagcattagcagttggttagcctggtatcagcagaaaccagggaaagcccctaagctcctgatctatgaagcatccaaactggcatctggggtcccatcaaggttcagcggcagtggatctgggacagaatttactctcaccatcagcagcctgcagcctgatgattttgcaacttattactgccaaggctatttttattttattagtcgtacttatgtaaattctttcggctgtgggaccaaggtggagatcaaaggtggaggcggttcaggcggaggtggaagtggtggtggcggctctggaggcggcggatctgaggtgcagctggtggagtctgggggaggcttggtccagcctggggggtccctgagactctcctgtgcagcctctggattcaccatcagtaccaatgcaatgagctgggtccgccaggctccagggaagtgcctggagtggatcggagtcattactggtcgtgatatcacatactacgcgagctgggcgaaaggcagattcaccatctccagagacaattccaagaacacgctgtatcttcaaatgaacagcctgagagccgaggacacggctgtgtattactgtgcgagagacggtggttcttctgctattactagtaacaacatttggggccagggaaccctggtcaccgtgtcgacaggcggtggagggtccggcggtggtggatcagaagtgcagctcgtcgaaagcggtggcggactggttcagcccggtggttctctgcggctgtcttgtgctgcctcgggtttcacgttcactgactacacaatggactgggtgcgtcaggctcctggaaagggattggagtgggtagccgacgttaatccaaactccggcgggagcatctacaaccagaggttcaaggggaggttcactctgagcgtggatcgctccaagaacacgctgtacctccagatgaactctctcagggccgaggacacggctgtttactattgcgcgaggaacctgggtccttccttctacttcgactactggggacagggaaccctggtgaccgtcagctccgctagcaccaagggcccatcggtcttccccctggcaccctcctccaagagcacctctgggggcacagcggccctgggctgcctggtcaaggactacttccccgaaccggtgacggtgtcgtggaactcaggcgccctgaccagcggcgtgcacaccttcccggctgtcctacagtcctcaggactctactccctcagcagcgtggtgaccgtgccctccagcagcttgggcacccagacctacatctgcaacgtgaatcacaagcccagcaacaccaaggtggacaagagagttgagcccaaatcttgtgacaaaactcacacatgcccaccgtgcccagcacctgaagccgcggggggaccgtcagtcttcctcttccccccaaaacccaaggacaccctcatgatctcccggacccctgaggtcacatgcgtggtggtggacgtgagccacgaagaccctgaggtcaagttcaactggtacgtggacggcgtggaggtgcataatgccaagacaaagccgcgggaggagcagtacgccagcacgtaccgtgtggtcagcgtcctcaccgtcctgcaccaggactggctgaatggcaaggagtacaagtgcgcggtctccaacaaagccctcccagcccccatcgagaaaaccatctccaaagccaaagggcagccccgagaaccacaggtgtacaccctgcccccatcccgggatgagctgaccaagaaccaggtcagcctgacctgcctggtcaaaggcttctatcccagcgacatcgccgtggagtgggagagcaatgggcagccggagaacaactacaagaccacgcctcccgtgctggactccgacggctccttcttcctctatagcaagctcaccgtggacaagagcaggtggcagcaggggaacgtcttctcatgctccgtgatgcatgaggctctgcacaaccactacacgcagaagagcctctccctgtctccgggtggcggtggagggtccggcggtggtggatccgaggtgcagctgttggagtctgggggaggcttggtacagcctggggggtccctgagactctcctgtgcagcctctggattctccttcagtagcgggtacgacatgtgctgggtccgccaggctccagggaagtgcctggagtggatcgcatgcattgctgctggtagtgctggtatcacttacgacgcgaactgggcgaaaggccggttcaccatctccagagacaattccaagaacacgctgtatctgcaaatgaacagcctgagagccgaggacacggccgtatattactgtgcgagatcggcgttttcgttcgactacgccatggacctctggggccagggaaccctggtcaccgtctcgagcggtggaggcggttcaggcggaggtggaagtggtggtggcggctctggaggcggcggatctgacatccagatgacccagtctccttccaccctgtctgcatctgtaggagacagagtcaccatcacttgccaggccagtcagagcattagttcccacttaaactggtatcagcagaaaccagggaaagcccctaagctcctgatctataaggcatccactctggcatctggggtcccatcaaggttcagcggcagtggatctgggacagaatttactctcaccatcagcagcctgcagcctgatgattttgcaacttattactgccaacagggttatagttggggtaatgttgataatgttttcggctgcgggaccaaggtggagatcaaaggtggtggcggctctggaggaggagggtccggacggtcgctggtggagtctgggggaggcttggtccagcctggggggtccctgagactctcctgtactgcctctggattcaccatcagtagctaccacatgcagtgggtccggcaggcacctgggaagtgcctggagtacatcggaaccattagtagtggtggtaatgtatactacgcaagctccgctagaggcagattcaccatctccagaccctcgtccaagaacacggtggatcttcaaatgaacagcctgagagccgaggacacggctgtgtattactgtgcgagagactctggttatagtgatcctatgtggggccagggaaccctggtcaccgtctcttcaggcggtggcggtagtgggggaggcggttctggcggcggagggtccggcggtggaggatcagacgttgtgatgacccagtctccatcttccgtgtctgcatctgtaggagacagagtcaccatcacctgtcaggccagtcagaacattaggacttacttatcctggtatcagcagaaaccagggaaagcccctaagctcctgatctatgctgcagccaatctggcatctggggtcccatcaaggttcagcggcagtggatctgggacagatttcactctcaccatcagcgacttggaacctggcgatgctgcaacttactattgtcagtctacctatcttggtactgattatgttggcggtgctttcggctgtgggaccaaggtggagatcaaatga

SEQ ID NO: 108 - protein, 1229 aa, Artificial Sequence
  Synthesized
DVVMTQSPSTLSASVGDRVTINCQASESISSWLAWYQQKPGKAPKLLIYEASKLASGVPSRFSGSGSGTEFTLTISSLQPDDFATYYCQGYFYFISRTYVNSFGCGTKVEIKGGGGSGGGGSGGGGSGGGGSEVQLVESGGGLVQPGGSLRLSCAASGFTISTNAMSWVRQAPGKCLEWIGVITGRDITYYASWAKGRFTISRDNSKNTLYLQMNSLRAEDTAVYYCARDGGSSAITSNNIWGQGTLVTVSTGGGGSGGGGSEVQLVESGGGLVQPGGSLRLSCAASGFTFTDYTMDWVRQAPGKGLEWVADVNPNSGGSIYNQRFKGRFTLSVDRSKNTLYLQMNSLRAEDTAVYYCARNLGPSFYFDYWGQGTLVTVSSASTKGPSVFPLAPSSKSTSGGTAALGCLVKDYFPEPVTVSWNSGALTSGVHTFPAVLQSSGLYSLSSVVTVPSSSLGTQTYICNVNHKPSNTKVDKRVEPKSCDKTHTCPPCPAPEAAGGPSVFLFPPKPKDTLMISRTPEVTCVVVDVSHEDPEVKFNWYVDGVEVHNAKTKPREEQYASTYRVVSVLTVLHQDWLNGKEYKCAVSNKALPAPIEKTISKAKGQPREPQVYTLPPSRDELTKNQVSLTCLVKGFYPSDIAVEWESNGQPENNYKTTPPVLDSDGSFFLYSKLTVDKSRWQQGNVFSCSVMHEALHNHYTQKSLSLSPGGGGGSGGGGSEVQLLESGGGLVQPGGSLRLSCAASGFSFSSGYDMCWVRQAPGKCLEWIACIAAGSAGITYDANWAKGRFTISRDNSKNTLYLQMNSLRAEDTAVYYCARSAFSFDYAMDLWGQGTLVTVSSGGGGSGGGGSGGGGSGGGGSDIQMTQSPSTLSASVGDRVTITCQASQSISSHLNWYQQKPGKAPKLLIYKASTLASGVPSRFSGSGSGTEFTLTISSLQPDDFATYYCQQGYSWGNVDNVFGCGTKVEIKGGGGSGGGGSGRSLVESGGGLVQPGGSLRLSCTASGFTISSYHMQWVRQAPGKCLEYIGTISSGGNVYYASSARGRFTISRPSSKNTVDLQMNSLRAEDTAVYYCARDSGYSDPMWGQGTLVTVSSGGGGSGGGGSGGGGSGGGGSDVVMTQSPSSVSASVGDRVTITCQASQNIRTYLSWYQQKPGKAPKLLIYAAANLASGVPSRFSGSGSGTDFTLTISDLEPGDAATYYCQSTYLGTDYVGGAFGCGTKVEIK

SEQ ID NO: 109 - DNA, 3690 bp, Artificial Sequence
  Synthesized
gacgtcgtgatgacccagtctccttccaccctgtctgcatctgtaggagacagagtcaccatcaattgccaagccagtgagagcattagcagttggttagcctggtatcagcagaaaccagggaaagcccctaagctcctgatctatgaagcatccaaactggcatctggggtcccatcaaggttcagcggcagtggatctgggacagaatttactctcaccatcagcagcctgcagcctgatgattttgcaacttattactgccaaggctatttttattttattagtcgtacttatgtaaattctttcggcggagggaccaaggtggagatcaaaggcggtggcggtagtgggggaggcggttctggcggcggagggtccggcggtggaggatcagaggtgcagctggtggagtctgggggaggcttggtccagcctggggggtccctgagactctcctgtgcagcctctggattcaccatcagtaccaatgcaatgagctgggtccgccaggctccagggaaggggctggagtggatcggagtcattactggtcgtgatatcacatactacgcgagctgggcgaaaggcagattcaccatctccagagacaattccaagaacacgctgtatcttcaaatgaacagcctgagagccgaggacacggctgtgtattactgtgcgagagacggtggttcttctgctattactagtaacaacatttggggccagggaaccctggtcaccgtgtcgacaggcggtggagggtccggcggtggtggatcacaggtacaactgcagcagtctgggcctgagctggagaagcctggcgcttcagtgaagatatcctgcaaggcttctggttactcattcactggctacaccatgaactgggtgaagcagagccatggaaagagccttgagtggattggacttattactccttacaatggtgcttctagctacaaccagaagttcaggggcaaggccacattaactgtagacaagtcatccagcacagcctacatggacctcctcagtctgacatctgaagactctgcagtctatttctgtgcaagggggggttacgacgggaggggttttgactactggggatctgggaccccggtcaccgtctcctcagctagcaccaagggcccatcggtcttccccctggcaccctcctccaagagcacctctgggggcacagcggccctgggctgcctggtcaaggactacttccccgaaccggtgacggtgtcgtggaactcaggcgccctgaccagcggcgtgcacaccttcccggctgtcctacagtcctcaggactctactccctcagcagcgtggtgaccgtgccctccagcagcttgggcacccagacctacatctgcaacgtgaatcacaagcccagcaacaccaaggtggacaagagagttgagcccaaatcttgtgacaaaactcacacatgcccaccgtgcccagcacctgaagccgcgggggcaccgtcagtcttcctcttccccccaaaacccaaggacaccctcatgatctcccggacccctgaggtcacatgcgtggtggtggacgtgagccacgaagaccctgaggtcaagttcaactggtacgtggacggcgtggaggtgcataatgccaagacaaagccgcgggaggagcagtacaacagcacgtaccgtgtggtcagcgtcctcaccgtcctgcaccaggactggctgaatggcaaggagtacaagtgcgcggtctccaacaaagccctcccagcccccatcgagaaaaccatctccaaagccaaagggcagccccgagaaccacaggtgtacaccctgcccccatcccgggatgagctgaccaagaaccaggtcagcctgacctgcctggtcaaaggcttctatcccagcgacatcgccgtggagtgggagagcaatgggcagccggagaacaactacaagaccacgcctcccgtgctggactccgacggctccttcttcctctatagcaagctcaccgtggacaagagcaggtggcagcaggggaacgtcttctcatgctccgtgatgcatgaggctctgcacaaccactacacgcagaagagcctctccctgtctccgggtggcggtggagggtccggcggtggtggatccgaggtgcagctgttggagtctgggggaggcttggtacagcctggggggtccctgagactctcctgtgcagcctctggattctccttcagtagcgggtacgacatgtgctgggtccgccaggctccagggaaggggctggagtggatcgcatgcattgctgctggtagtgctggtatcacttacgacgcgaactgggcgaaaggccggttcaccatctccagagacaattccaagaacacgctgtatctgcaaatgaacagcctgagagccgaggacacggccgtatattactgtgcgagatcggcgttttcgttcgactacgccatggacctctggggccagggaaccctggtcaccgtctcgagcggtggaggcggatctggcggaggtggttccggcggtggcggctccggtggaggcggctctgacatccagatgacccagtctccttccaccctgtctgcatctgtaggagacagagtcaccatcacttgccaggccagtcagagcattagttcccacttaaactggtatcagcagaaaccagggaaagcccctaagctcctgatctataaggcatccactctggcatctggggtcccatcaaggttcagcggcagtggatctgggacagaatttactctcaccatcagcagcctgcagcctgatgattttgcaacttattactgccaacagggttatagttggggtaatgttgataatgttttcggcggagggaccaaggtggagatcaaaggcggtggagggtccggcggtggtggctccggacggtcgctggtggagtctgggggaggcttggtccagcctggggggtccctgagactctcctgtactgcctctggattcaccatcagtagctaccacatgcagtgggtccgccaggctccagggaaggggctggagtacatcggaaccattagtagtggtggtaatgtatactacgcaagctccgctagaggcagattcaccatctccagaccctcgtccaagaacacggtggatcttcaaatgaacagcctgagagccgaggacacggctgtgtattactgtgcgagagactctggttatagtgatcctatgtggggccagggaaccctggtcaccgtctcttcaggcggtggcggtagtgggggaggcggttctggcggcggagggtccggcggtggaggatcagacgttgtgatgacccagtctccatcttccgtgtctgcatctgtaggagacagagtcaccatcacctgtcaggccagtcagaacattaggacttacttatcctggtatcagcagaaaccagggaaagcccctaagctcctgatctatgctgcagccaatctggcatctggggtcccatcaaggttcagcggcagtggatctgggacagatttcactctcaccatcagcgacctggagcctggcgatgctgcaacttactattgtcagtctacctatcttggtactgattatgttggcggtgctttcggcggagggaccaaggtggagatcaaatga

SEQ ID NO: 110 - protein, 1229 aa, Artificial Sequence
  Synthesized
DVVMTQSPSTLSASVGDRVTINCQASESISSWLAWYQQKPGKAPKLLIYEASKLASGVPSRFSGSGSGTEFTLTISSLQPDDFATYYCQGYFYFISRTYVNSFGGGTKVEIKGGGGSGGGGSGGGGSGGGGSEVQLVESGGGLVQPGGSLRLSCAASGFTISTNAMSWVRQAPGKGLEWIGVITGRDITYYASWAKGRFTISRDNSKNTLYLQMNSLRAEDTAVYYCARDGGSSAITSNNIWGQGTLVTVSTGGGGSGGGGSQVQLQQSGPELEKPGASVKISCKASGYSFTGYTMNWVKQSHGKSLEWIGLITPYNGASSYNQKFRGKATLTVDKSSSTAYMDLLSLTSEDSAVYFCARGGYDGRGFDYWGSGTPVTVSSASTKGPSVFPLAPSSKSTSGGTAALGCLVKDYFPEPVTVSWNSGALTSGVHTFPAVLQSSGLYSLSSVVTVPSSSLGTQTYICNVNHKPSNTKVDKRVEPKSCDKTHTCPPCPAPEAAGAPSVFLFPPKPKDTLMISRTPEVTCVVVDVSHEDPEVKFNWYVDGVEVHNAKTKPREEQYNSTYRVVSVLTVLHQDWLNGKEYKCAVSNKALPAPIEKTISKAKGQPREPQVYTLPPSRDELTKNQVSLTCLVKGFYPSDIAVEWESNGQPENNYKTTPPVLDSDGSFFLYSKLTVDKSRWQQGNVFSCSVMHEALHNHYTQKSLSLSPGGGGGSGGGGSEVQLLESGGGLVQPGGSLRLSCAASGFSFSSGYDMCWVRQAPGKGLEWIACIAAGSAGITYDANWAKGRFTISRDNSKNTLYLQMNSLRAEDTAVYYCARSAFSFDYAMDLWGQGTLVTVSSGGGGSGGGGSGGGGSGGGGSDIQMTQSPSTLSASVGDRVTITCQASQSISSHLNWYQQKPGKAPKLLIYKASTLASGVPSRFSGSGSGTEFTLTISSLQPDDFATYYCQQGYSWGNVDNVFGGGTKVEIKGGGGSGGGGSGRSLVESGGGLVQPGGSLRLSCTASGFTISSYHMQWVRQAPGKGLEYIGTISSGGNVYYASSARGRFTISRPSSKNTVDLQMNSLRAEDTAVYYCARDSGYSDPMWGQGTLVTVSSGGGGSGGGGSGGGGSGGGGSDVVMTQSPSSVSASVGDRVTITCQASQNIRTYLSWYQQKPGKAPKLLIYAAANLASGVPSRFSGSGSGTDFTLTISDLEPGDAATYYCQSTYLGTDYVGGAFGGGTKVEIK

SEQ ID NO: 111 - DNA, 642 bp, Artificial Sequence
  Synthesized
gacatcgagctcactcagtctccagcaatcatgtctgcatctccaggggagaaggtcaccatgacctgcagtgccagctcaagtgtaagttacatgcactggtaccagcagaagtcaggcacctcccccaaaagatggatttatgacacatccaaactggcttctggagtcccaggtcgcttcagtggcagtgggtctggaaactcttactctctcacaatcagcagcgtggaggctgaagatgatgcaacttattactgccagcagtggagtaagcaccctctcacgttcggatccgggaccaaggtggaaatcaaacgtacggtggctgcaccatctgtcttcatcttcccgccatctgatgagcagttgaaatctggaactgcctctgttgtgtgcctgctgaataacttctatcccagagaggccaaagtacagtggaaggtggataacgccctccaatcgggtaactcccaggagagtgtcacagagcaggacagcaaggacagcacctacagcctcagcagcaccctgacgctgagcaaagcagactacgagaaacacaaagtctacgcctgcgaagtcacccatcagggcctgagctcgcccgtcacaaagagcttcaacaggggagagtgttag

SEQ ID NO: 112 - protein, 213 aa, Artificial Sequence
  Synthesized
DIELTQSPAIMSASPGEKVTMTCSASSSVSYMHWYQQKSGTSPKRWIYDTSKLASGVPGRFSGSGSGNSYSLTISSVEAEDDATYYCQQWSKHPLTFGSGTKVEIKRTVAAPSVFIFPPSDEQLKSGTASVVCLLNNFYPREAKVQWKVDNALQSGNSQESVTEQDSKDSTYSLSSTLTLSKADYEKHKVYACEVTHQGLSSPVTKSFNRGEC

SEQ ID NO: 113 - DNA, 3690 bp, Artificial Sequence
  Synthesized
gacgtcgtgatgacccagtctccttccaccctgtctgcatctgtaggagacagagtcaccatcaattgccaagccagtgagagcattagcagttggttagcctggtatcagcagaaaccagggaaagcccctaagctcctgatctatgaagcatccaaactggcatctggggtcccatcaaggttcagcggcagtggatctgggacagaatttactctcaccatcagcagcctgcagcctgatgattttgcaacttattactgccaaggctatttttattttattagtcgtacttatgtaaattctttcggctgtgggaccaaggtggagatcaaaggtggaggcggttcaggcggaggtggaagtggtggtggcggctctggaggcggcggatctgaggtgcagctggtggagtctgggggaggcttggtccagcctggggggtccctgagactctcctgtgcagcctctggattcaccatcagtaccaatgcaatgagctgggtccgccaggctccagggaagtgcctggagtggatcggagtcattactggtcgtgatatcacatactacgcgagctgggcgaaaggcagattcaccatctccagagacaattccaagaacacgctgtatcttcaaatgaacagcctgagagccgaggacacggctgtgtattactgtgcgagagacggtggttcttctgctattactagtaacaacatttggggccagggaaccctggtcaccgtgtcgacaggcggtggagggtccggcggtggtggatcacaggtacaactgcagcagtctgggcctgagctggagaagcctggcgcttcagtgaagatatcctgcaaggcttctggttactcattcactggctacaccatgaactgggtgaagcagagccatggaaagagccttgagtggattggacttattactccttacaatggtgcttctagctacaaccagaagttcaggggcaaggccacattaactgtagacaagtcatccagcacagcctacatggacctcctcagtctgacatctgaagactctgcagtctatttctgtgcaagggggggttacgacgggaggggttttgactactggggatctgggaccccggtcaccgtctcctcagctagcaccaagggcccatcggtcttccccctggcaccctcctccaagagcacctctgggggcacagcggccctgggctgcctggtcaaggactacttccccgaaccggtgacggtgtcgtggaactcaggcgccctgaccagcggcgtgcacaccttcccggctgtcctacagtcctcaggactctactccctcagcagcgtggtgaccgtgccctccagcagcttgggcacccagacctacatctgcaacgtgaatcacaagcccagcaacaccaaggtggacaagagagttgagcccaaatcttgtgacaaaactcacacatgcccaccgtgcccagcacctgaagccgcggggggaccgtcagtcttcctcttccccccaaaacccaaggacaccctcatgatctcccggacccctgaggtcacatgcgtggtggtggacgtgagccacgaagaccctgaggtcaagttcaactggtacgtggacggcgtggaggtgcataatgccaagacaaagccgcgggaggagcagtacgccagcacgtaccgtgtggtcagcgtcctcaccgtcctgcaccaggactggctgaatggcaaggagtacaagtgcgcggtctccaacaaagccctcccagcccccatcgagaaaaccatctccaaagccaaagggcagccccgagaaccacaggtgtacaccctgcccccatcccgggatgagctgaccaagaaccaggtcagcctgacctgcctggtcaaaggcttctatcccagcgacatcgccgtggagtgggagagcaatgggcagccggagaacaactacaagaccacgcctcccgtgctggactccgacggctccttcttcctctatagcaagctcaccgtggacaagagcaggtggcagcaggggaacgtcttctcatgctccgtgatgcatgaggctctgcacaaccactacacgcagaagagcctctccctgtctccgggtggcggtggagggtccggcggtggtggatccgaggtgcagctgttggagtctgggggaggcttggtacagcctggggggtccctgagactctcctgtgcagcctctggattctccttcagtagcgggtacgacatgtgctgggtccgccaggctccagggaagtgcctggagtggatcgcatgcattgctgctggtagtgctggtatcacttacgacgcgaactgggcgaaaggccggttcaccatctccagagacaattccaagaacacgctgtatctgcaaatgaacagcctgagagccgaggacacggccgtatattactgtgcgagatcggcgttttcgttcgactacgccatggacctctggggccagggaaccctggtcaccgtctcgagcggtggaggcggttcaggcggaggtggaagtggtggtggcggctctggaggcggcggatctgacatccagatgacccagtctccttccaccctgtctgcatctgtaggagacagagtcaccatcacttgccaggccagtcagagcattagttcccacttaaactggtatcagcagaaaccagggaaagcccctaagctcctgatctataaggcatccactctggcatctggggtcccatcaaggttcagcggcagtggatctgggacagaatttactctcaccatcagcagcctgcagcctgatgattttgcaacttattactgccaacagggttatagttggggtaatgttgataatgttttcggctgcgggaccaaggtggagatcaaaggtggtggcggctctggaggaggagggtccggacggtcgctggtggagtctgggggaggcttggtccagcctggggggtccctgagactctcctgtactgcctctggattcaccatcagtagctaccacatgcagtgggtccggcaggcacctgggaagtgcctggagtacatcggaaccattagtagtggtggtaatgtatactacgcaagctccgctagaggcagattcaccatctccagaccctcgtccaagaacacggtggatcttcaaatgaacagcctgagagccgaggacacggctgtgtattactgtgcgagagactctggttatagtgatcctatgtggggccagggaaccctggtcaccgtctcttcaggcggtggcggtagtgggggaggcggttctggcggcggagggtccggcggtggaggatcagacgttgtgatgacccagtctccatcttccgtgtctgcatctgtaggagacagagtcaccatcacctgtcaggccagtcagaacattaggacttacttatcctggtatcagcagaaaccagggaaagcccctaagctcctgatctatgctgcagccaatctggcatctggggtcccatcaaggttcagcggcagtggatctgggacagatttcactctcaccatcagcgacttggaacctggcgatgctgcaacttactattgtcagtctacctatcttggtactgattatgttggcggtgctttcggctgtgggaccaaggtggagatcaaatga

SEQ ID NO: 114 - protein, 1229 aa, Artificial Sequence
  Synthesized
DVVMTQSPSTLSASVGDRVTINCQASESISSWLAWYQQKPGKAPKLLIYEASKLASGVPSRFSGSGSGTEFTLTISSLQPDDFATYYCQGYFYFISRTYVNSFGCGTKVEIKGGGGSGGGGSGGGGSGGGGSEVQLVESGGGLVQPGGSLRLSCAASGFTISTNAMSWVRQAPGKCLEWIGVITGRDITYYASWAKGRFTISRDNSKNTLYLQMNSLRAEDTAVYYCARDGGSSAITSNNIWGQGTLVTVSTGGGGSGGGGSQVQLQQSGPELEKPGASVKISCKASGYSFTGYTMNWVKQSHGKSLEWIGLITPYNGASSYNQKFRGKATLTVDKSSSTAYMDLLSLTSEDSAVYFCARGGYDGRGFDYWGSGTPVTVSSASTKGPSVFPLAPSSKSTSGGTAALGCLVKDYFPEPVTVSWNSGALTSGVHTFPAVLQSSGLYSLSSVVTVPSSSLGTQTYICNVNHKPSNTKVDKRVEPKSCDKTHTCPPCPAPEAAGGPSVFLFPPKPKDTLMISRTPEVTCVVVDVSHEDPEVKFNWYVDGVEVHNAKTKPREEQYASTYRVVSVLTVLHQDWLNGKEYKCAVSNKALPAPIEKTISKAKGQPREPQVYTLPPSRDELTKNQVSLTCLVKGFYPSDIAVEWESNGQPENNYKTTPPVLDSDGSFFLYSKLTVDKSRWQQGNVFSCSVMHEALHNHYTQKSLSLSPGGGGGSGGGGSEVQLLESGGGLVQPGGSLRLSCAASGFSFSSGYDMCWVRQAPGKCLEWIACIAAGSAGITYDANWAKGRFTISRDNSKNTLYLQMNSLRAEDTAVYYCARSAFSFDYAMDLWGQGTLVTVSSGGGGSGGGGSGGGGSGGGGSDIQMTQSPSTLSASVGDRVTITCQASQSISSHLNWYQQKPGKAPKLLIYKASTLASGVPSRFSGSGSGTEFTLTISSLQPDDFATYYCQQGYSWGNVDNVFGCGTKVEIKGGGGSGGGGSGRSLVESGGGLVQPGGSLRLSCTASGFTISSYHMQWVRQAPGKCLEYIGTISSGGNVYYASSARGRFTISRPSSKNTVDLQMNSLRAEDTAVYYCARDSGYSDPMWGQGTLVTVSSGGGGSGGGGSGGGGSGGGGSDVVMTQSPSSVSASVGDRVTITCQASQNIRTYLSWYQQKPGKAPKLLIYAAANLASGVPSRFSGSGSGTDFTLTISDLEPGDAATYYCQSTYLGTDYVGGAFGCGTKVEIK

SEQ ID NO: 115 - DNA, 3672 bp, Artificial Sequence
  Synthesized
gacgtcgtgatgacccagtctccttccaccctgtctgcatctgtaggagacagagtcaccatcaattgccaagccagtgagagcattagcagttggttagcctggtatcagcagaaaccagggaaagcccctaagctcctgatctatgaagcatccaaactggcatctggggtcccatcaaggttcagcggcagtggatctgggacagaatttactctcaccatcagcagcctgcagcctgatgattttgcaacttattactgccaaggctatttttattttattagtcgtacttatgtaaattctttcggcggagggaccaaggtggagatcaaaggcggtggcggtagtgggggaggcggttctggcggcggagggtccggcggtggaggatcagaggtgcagctggtggagtctgggggaggcttggtccagcctggggggtccctgagactctcctgtgcagcctctggattcaccatcagtaccaatgcaatgagctgggtccgccaggctccagggaaggggctggagtggatcggagtcattactggtcgtgatatcacatactacgcgagctgggcgaaaggcagattcaccatctccagagacaattccaagaacacgctgtatcttcaaatgaacagcctgagagccgaggacacggctgtgtattactgtgcgagagacggtggttcttctgctattactagtaacaacatttggggccagggaaccctggtcaccgtgtcgacaggcggtggagggtccggcggtggtggatcagaggtccaactgctgcagtctggacctgagctggagaagcctggcgcttcagtgatgatatcctgcaaggcttctggttcctcattcactggctacaacatgaactgggtgaggcagaacattggaaagagccttgaatggattggagctattgatccttactatggtggaactagctacaaccagaagttcaagggcagggccacattgactgtagacaaatcgtccagcacagcctacatgcacctcaagagcctgacatctgaggactctgcagtctattactgtgtaagcggaatggagtactggggtcaaggaacctcagtcaccgtctcctcagctagcaccaagggcccatcggtcttccccctggcaccctcctccaagagcacctctgggggcacagcggccctgggctgcctggtcaaggactacttccccgaaccggtgacggtgtcgtggaactcaggcgccctgaccagcggcgtgcacaccttcccggctgtcctacagtcctcaggactctactccctcagcagcgtggtgaccgtgccctccagcagcttgggcacccagacctacatctgcaacgtgaatcacaagcccagcaacaccaaggtggacaagagagttgagcccaaatcttgtgacaaaactcacacatgcccaccgtgcccagcacctgaagccgcgggggcaccgtcagtcttcctcttccccccaaaacccaaggacaccctcatgatctcccggacccctgaggtcacatgcgtggtggtggacgtgagccacgaagaccctgaggtcaagttcaactggtacgtggacggcgtggaggtgcataatgccaagacaaagccgcgggaggagcagtacaacagcacgtaccgtgtggtcagcgtcctcaccgtcctgcaccaggactggctgaatggcaaggagtacaagtgcgcggtctccaacaaagccctcccagcccccatcgagaaaaccatctccaaagccaaagggcagccccgagaaccacaggtgtacaccctgcccccatcccgggatgagctgaccaagaaccaggtcagcctgacctgcctggtcaaaggcttctatcccagcgacatcgccgtggagtgggagagcaatgggcagccggagaacaactacaagaccacgcctcccgtgctggactccgacggctccttcttcctctatagcaagctcaccgtggacaagagcaggtggcagcaggggaacgtcttctcatgctccgtgatgcatgaggctctgcacaaccactacacgcagaagagcctctccctgtctccgggtggcggtggagggtccggcggtggtggatccgaggtgcagctgttggagtctgggggaggcttggtacagcctggggggtccctgagactctcctgtgcagcctctggattctccttcagtagcgggtacgacatgtgctgggtccgccaggctccagggaaggggctggagtggatcgcatgcattgctgctggtagtgctggtatcacttacgacgcgaactgggcgaaaggccggttcaccatctccagagacaattccaagaacacgctgtatctgcaaatgaacagcctgagagccgaggacacggccgtatattactgtgcgagatcggcgttttcgttcgactacgccatggacctctggggccagggaaccctggtcaccgtctcgagcggtggaggcggatctggcggaggtggttccggcggtggcggctccggtggaggcggctctgacatccagatgacccagtctccttccaccctgtctgcatctgtaggagacagagtcaccatcacttgccaggccagtcagagcattagttcccacttaaactggtatcagcagaaaccagggaaagcccctaagctcctgatctataaggcatccactctggcatctggggtcccatcaaggttcagcggcagtggatctgggacagaatttactctcaccatcagcagcctgcagcctgatgattttgcaacttattactgccaacagggttatagttggggtaatgttgataatgttttcggcggagggaccaaggtggagatcaaaggcggtggagggtccggcggtggtggctccggacggtcgctggtggagtctgggggaggcttggtccagcctggggggtccctgagactctcctgtactgcctctggattcaccatcagtagctaccacatgcagtgggtccgccaggctccagggaaggggctggagtacatcggaaccattagtagtggtggtaatgtatactacgcaagctccgctagaggcagattcaccatctccagaccctcgtccaagaacacggtggatcttcaaatgaacagcctgagagccgaggacacggctgtgtattactgtgcgagagactctggttatagtgatcctatgtggggccagggaaccctggtcaccgtctcttcaggcggtggcggtagtgggggaggcggttctggcggcggagggtccggcggtggaggatcagacgttgtgatgacccagtctccatcttccgtgtctgcatctgtaggagacagagtcaccatcacctgtcaggccagtcagaacattaggacttacttatcctggtatcagcagaaaccagggaaagcccctaagctcctgatctatgctgcagccaatctggcatctggggtcccatcaaggttcagcggcagtggatctgggacagatttcactctcaccatcagcgacctggagcctggcgatgctgcaacttactattgtcagtctacctatcttggtactgattatgttggcggtgctttcggcggagggaccaaggtggagatcaaatga

SEQ ID NO: 116 - protein, 1223 aa, Artificial Sequence
  Synthesized
DVVMTQSPSTLSASVGDRVTINCQASESISSWLAWYQQKPGKAPKLLIYEASKLASGVPSRFSGSGSGTEFTLTISSLQPDDFATYYCQGYFYFISRTYVNSFGGGTKVEIKGGGGSGGGGSGGGGSGGGGSEVQLVESGGGLVQPGGSLRLSCAASGFTISTNAMSWVRQAPGKGLEWIGVITGRDITYYASWAKGRFTISRDNSKNTLYLQMNSLRAEDTAVYYCARDGGSSAITSNNIWGQGTLVTVSTGGGGSGGGGSEVQLLQSGPELEKPGASVMISCKASGSSFTGYNMNWVRQNIGKSLEWIGAIDPYYGGTSYNQKFKGRATLTVDKSSSTAYMHLKSLTSEDSAVYYCVSGMEYWGQGTSVTVSSASTKGPSVFPLAPSSKSTSGGTAALGCLVKDYFPEPVTVSWNSGALTSGVHTFPAVLQSSGLYSLSSVVTVPSSSLGTQTYICNVNHKPSNTKVDKRVEPKSCDKTHTCPPCPAPEAAGAPSVFLFPPKPKDTLMISRTPEVTCVVVDVSHEDPEVKFNWYVDGVEVHNAKTKPREEQYNSTYRVVSVLTVLHQDWLNGKEYKCAVSNKALPAPIEKTISKAKGQPREPQVYTLPPSRDELTKNQVSLTCLVKGFYPSDIAVEWESNGQPENNYKTTPPVLDSDGSFFLYSKLTVDKSRWQQGNVFSCSVMHEALHNHYTQKSLSLSPGGGGGSGGGGSEVQLLESGGGLVQPGGSLRLSCAASGFSFSSGYDMCWVRQAPGKGLEWIACIAAGSAGITYDANWAKGRFTISRDNSKNTLYLQMNSLRAEDTAVYYCARSAFSFDYAMDLWGQGTLVTVSSGGGGSGGGGSGGGGSGGGGSDIQMTQSPSTLSASVGDRVTITCQASQSISSHLNWYQQKPGKAPKLLIYKASTLASGVPSRFSGSGSGTEFTLTISSLQPDDFATYYCQQGYSWGNVDNVFGGGTKVEIKGGGGSGGGGSGRSLVESGGGLVQPGGSLRLSCTASGFTISSYHMQWVRQAPGKGLEYIGTISSGGNVYYASSARGRFTISRPSSKNTVDLQMNSLRAEDTAVYYCARDSGYSDPMWGQGTLVTVSSGGGGSGGGGSGGGGSGGGGSDVVMTQSPSSVSASVGDRVTITCQASQNIRTYLSWYQQKPGKAPKLLIYAAANLASGVPSRFSGSGSGTDFTLTISDLEPGDAATYYCQSTYLGTDYVGGAFGGGTKVEIK

SEQ ID NO: 117 - DNA, 663 bp, Artificial Sequence
  Synthesized
gaaatagtgatgacgcagtctccagccaccctgtctgtgtctccaggggaaagagccaccctctcctgcagatctagtcagagtcttgtacaccgtaatggaaacacctatttacattggtacctgcagaagccaggccagtctccaaagctcctgattcacaaagtttccaaccgattttctggggtcccagacaggttcagtggcagtggatcagggacagatttcacactcaagatcagcagagtggaggctgaggatctgggagtttatttctgttctcaaagtacacatgttcctccgctcacgttcggtgctgggaccaagctggagctgaaacgtacggtggctgcaccatctgtcttcatcttcccgccatctgatgagcagttgaaatctggaactgcctctgttgtgtgcctgctgaataacttctatcccagagaggccaaagtacagtggaaggtggataacgccctccaatcgggtaactcccaggagagtgtcacagagcaggacagcaaggacagcacctacagcctcagcagcaccctgacgctgagcaaagcagactacgagaaacacaaagtctacgcctgcgaagtcacccatcagggcctgagctcgcccgtcacaaagagcttcaacaggggagagtgttag

SEQ ID NO: 118 - protein, 220 aa, Artificial Sequence
  Synthesized
EIVMTQSPATLSVSPGERATLSCRSSQSLVHRNGNTYLHWYLQKPGQSPKLLIHKVSNRFSGVPDRFSGSGSGTDFTLKISRVEAEDLGVYFCSQSTHVPPLTFGAGTKLELKRTVAAPSVFIFPPSDEQLKSGTASVVCLLNNFYPREAKVQWKVDNALQSGNSQESVTEQDSKDSTYSLSSTLTLSKADYEKHKVYACEVTHQGLSSPVTKSFNRGEC

SEQ ID NO: 119 - DNA, 3672 bp, Artificial Sequence
  Synthesized
gacgtcgtgatgacccagtctccttccaccctgtctgcatctgtaggagacagagtcaccatcaattgccaagccagtgagagcattagcagttggttagcctggtatcagcagaaaccagggaaagcccctaagctcctgatctatgaagcatccaaactggcatctggggtcccatcaaggttcagcggcagtggatctgggacagaatttactctcaccatcagcagcctgcagcctgatgattttgcaacttattactgccaaggctatttttattttattagtcgtacttatgtaaattctttcggctgtgggaccaaggtggagatcaaaggtggaggcggttcaggcggaggtggaagtggtggtggcggctctggaggcggcggatctgaggtgcagctggtggagtctgggggaggcttggtccagcctggggggtccctgagactctcctgtgcagcctctggattcaccatcagtaccaatgcaatgagctgggtccgccaggctccagggaagtgcctggagtggatcggagtcattactggtcgtgatatcacatactacgcgagctgggcgaaaggcagattcaccatctccagagacaattccaagaacacgctgtatcttcaaatgaacagcctgagagccgaggacacggctgtgtattactgtgcgagagacggtggttcttctgctattactagtaacaacatttggggccagggaaccctggtcaccgtgtcgacaggcggtggagggtccggcggtggtggatcagaggtccaactgctgcagtctggacctgagctggagaagcctggcgcttcagtgatgatatcctgcaaggcttctggttcctcattcactggctacaacatgaactgggtgaggcagaacattggaaagagccttgaatggattggagctattgatccttactatggtggaactagctacaaccagaagttcaagggcagggccacattgactgtagacaaatcgtccagcacagcctacatgcacctcaagagcctgacatctgaggactctgcagtctattactgtgtaagcggaatggagtactggggtcaaggaacctcagtcaccgtctcctcagctagcaccaagggcccatcggtcttccccctggcaccctcctccaagagcacctctgggggcacagcggccctgggctgcctggtcaaggactacttccccgaaccggtgacggtgtcgtggaactcaggcgccctgaccagcggcgtgcacaccttcccggctgtcctacagtcctcaggactctactccctcagcagcgtggtgaccgtgccctccagcagcttgggcacccagacctacatctgcaacgtgaatcacaagcccagcaacaccaaggtggacaagagagttgagcccaaatcttgtgacaaaactcacacatgcccaccgtgcccagcacctgaagccgcggggggaccgtcagtcttcctcttccccccaaaacccaaggacaccctcatgatctcccggacccctgaggtcacatgcgtggtggtggacgtgagccacgaagaccctgaggtcaagttcaactggtacgtggacggcgtggaggtgcataatgccaagacaaagccgcgggaggagcagtacgccagcacgtaccgtgtggtcagcgtcctcaccgtcctgcaccaggactggctgaatggcaaggagtacaagtgcgcggtctccaacaaagccctcccagcccccatcgagaaaaccatctccaaagccaaagggcagccccgagaaccacaggtgtacaccctgcccccatcccgggatgagctgaccaagaaccaggtcagcctgacctgcctggtcaaaggcttctatcccagcgacatcgccgtggagtgggagagcaatgggcagccggagaacaactacaagaccacgcctcccgtgctggactccgacggctccttcttcctctatagcaagctcaccgtggacaagagcaggtggcagcaggggaacgtcttctcatgctccgtgatgcatgaggctctgcacaaccactacacgcagaagagcctctccctgtctccgggtggcggtggagggtccggcggtggtggatccgaggtgcagctgttggagtctgggggaggcttggtacagcctggggggtccctgagactctcctgtgcagcctctggattctccttcagtagcgggtacgacatgtgctgggtccgccaggctccagggaagtgcctggagtggatcgcatgcattgctgctggtagtgctggtatcacttacgacgcgaactgggcgaaaggccggttcaccatctccagagacaattccaagaacacgctgtatctgcaaatgaacagcctgagagccgaggacacggccgtatattactgtgcgagatcggcgttttcgttcgactacgccatggacctctggggccagggaaccctggtcaccgtctcgagcggtggaggcggttcaggcggaggtggaagtggtggtggcggctctggaggcggcggatctgacatccagatgacccagtctccttccaccctgtctgcatctgtaggagacagagtcaccatcacttgccaggccagtcagagcattagttcccacttaaactggtatcagcagaaaccagggaaagcccctaagctcctgatctataaggcatccactctggcatctggggtcccatcaaggttcagcggcagtggatctgggacagaatttactctcaccatcagcagcctgcagcctgatgattttgcaacttattactgccaacagggttatagttggggtaatgttgataatgttttcggctgcgggaccaaggtggagatcaaaggtggtggcggctctggaggaggagggtccggacggtcgctggtggagtctgggggaggcttggtccagcctggggggtccctgagactctcctgtactgcctctggattcaccatcagtagctaccacatgcagtgggtccggcaggcacctgggaagtgcctggagtacatcggaaccattagtagtggtggtaatgtatactacgcaagctccgctagaggcagattcaccatctccagaccctcgtccaagaacacggtggatcttcaaatgaacagcctgagagccgaggacacggctgtgtattactgtgcgagagactctggttatagtgatcctatgtggggccagggaaccctggtcaccgtctcttcaggcggtggcggtagtgggggaggcggttctggcggcggagggtccggcggtggaggatcagacgttgtgatgacccagtctccatcttccgtgtctgcatctgtaggagacagagtcaccatcacctgtcaggccagtcagaacattaggacttacttatcctggtatcagcagaaaccagggaaagcccctaagctcctgatctatgctgcagccaatctggcatctggggtcccatcaaggttcagcggcagtggatctgggacagatttcactctcaccatcagcgacttggaacctggcgatgctgcaacttactattgtcagtctacctatcttggtactgattatgttggcggtgctttcggctgtgggaccaaggtggagatcaaatga

SEQ ID NO: 120 - protein, 1223 aa, Artificial Sequence
  Synthesized
DVVMTQSPSTLSASVGDRVTINCQASESISSWLAWYQQKPGKAPKLLIYEASKLASGVPSRFSGSGSGTEFTLTISSLQPDDFATYYCQGYFYFISRTYVNSFGCGTKVEIKGGGGSGGGGSGGGGSGGGGSEVQLVESGGGLVQPGGSLRLSCAASGFTISTNAMSWVRQAPGKCLEWIGVITGRDITYYASWAKGRFTISRDNSKNTLYLQMNSLRAEDTAVYYCARDGGSSAITSNNIWGQGTLVTVSTGGGGSGGGGSEVQLLQSGPELEKPGASVMISCKASGSSFTGYNMNWVRQNIGKSLEWIGAIDPYYGGTSYNQKFKGRATLTVDKSSSTAYMHLKSLTSEDSAVYYCVSGMEYWGQGTSVTVSSASTKGPSVFPLAPSSKSTSGGTAALGCLVKDYFPEPVTVSWNSGALTSGVHTFPAVLQSSGLYSLSSVVTVPSSSLGTQTYICNVNHKPSNTKVDKRVEPKSCDKTHTCPPCPAPEAAGGPSVFLFPPKPKDTLMISRTPEVTCVVVDVSHEDPEVKFNWYVDGVEVHNAKTKPREEQYASTYRVVSVLTVLHQDWLNGKEYKCAVSNKALPAPIEKTISKAKGQPREPQVYTLPPSRDELTKNQVSLTCLVKGFYPSDIAVEWESNGQPENNYKTTPPVLDSDGSFFLYSKLTVDKSRWQQGNVFSCSVMHEALHNHYTQKSLSLSPGGGGGSGGGGSEVQLLESGGGLVQPGGSLRLSCAASGFSFSSGYDMCWVRQAPGKCLEWIACIAAGSAGITYDANWAKGRFTISRDNSKNTLYLQMNSLRAEDTAVYYCARSAFSFDYAMDLWGQGTLVTVSSGGGGSGGGGSGGGGSGGGGSDIQMTQSPSTLSASVGDRVTITCQASQSISSHLNWYQQKPGKAPKLLIYKASTLASGVPSRFSGSGSGTEFTLTISSLQPDDFATYYCQQGYSWGNVDNVFGCGTKVEIKGGGGSGGGGSGRSLVESGGGLVQPGGSLRLSCTASGFTISSYHMQWVRQAPGKCLEYIGTISSGGNVYYASSARGRFTISRPSSKNTVDLQMNSLRAEDTAVYYCARDSGYSDPMWGQGTLVTVSSGGGGSGGGGSGGGGSGGGGSDVVMTQSPSSVSASVGDRVTITCQASQNIRTYLSWYQQKPGKAPKLLIYAAANLASGVPSRFSGSGSGTDFTLTISDLEPGDAATYYCQSTYLGTDYVGGAFGCGTKVEIK

SEQ ID NO: 121 - DNA, 3687 bp, Artificial Sequence
  Synthesized
gacgtcgtgatgacccagtctccttccaccctgtctgcatctgtaggagacagagtcaccatcaattgccaagccagtgagagcattagcagttggttagcctggtatcagcagaaaccagggaaagcccctaagctcctgatctatgaagcatccaaactggcatctggggtcccatcaaggttcagcggcagtggatctgggacagaatttactctcaccatcagcagcctgcagcctgatgattttgcaacttattactgccaaggctatttttattttattagtcgtacttatgtaaattctttcggcggagggaccaaggtggagatcaaaggcggtggcggtagtgggggaggcggttctggcggcggagggtccggcggtggaggatcagaggtgcagctggtggagtctgggggaggcttggtccagcctggggggtccctgagactctcctgtgcagcctctggattcaccatcagtaccaatgcaatgagctgggtccgccaggctccagggaaggggctggagtggatcggagtcattactggtcgtgatatcacatactacgcgagctgggcgaaaggcagattcaccatctccagagacaattccaagaacacgctgtatcttcaaatgaacagcctgagagccgaggacacggctgtgtattactgtgcgagagacggtggttcttctgctattactagtaacaacatttggggccagggaaccctggtcaccgtgtcgacaggcggtggagggtccggcggtggtggatcacaggtccaactgcagcagcctggggctgagctggtgaggcctggggcttcagtgaagctgtcctgcaaggcttctggctacaccttcaccagctactggataaactgggtgaagcagaggcctggacaaggccttgagtggatcggaaatatttatccttctgatagttatactaactacaatcaaaagttcaaggacaaggccacattgactgtagacaaatcctccagcacagcctacatgcagctcagcagcccgacatctgaggactctgcggtctattactgtacaagatcgtggaggggtaactcctttgactactggggccaaggcaccactctcacagtctcctcagctagcaccaagggcccatcggtcttccccctggcaccctcctccaagagcacctctgggggcacagcggccctgggctgcctggtcaaggactacttccccgaaccggtgacggtgtcgtggaactcaggcgccctgaccagcggcgtgcacaccttcccggctgtcctacagtcctcaggactctactccctcagcagcgtggtgaccgtgccctccagcagcttgggcacccagacctacatctgcaacgtgaatcacaagcccagcaacaccaaggtggacaagagagttgagcccaaatcttgtgacaaaactcacacatgcccaccgtgcccagcacctgaagccgcgggggcaccgtcagtcttcctcttccccccaaaacccaaggacaccctcatgatctcccggacccctgaggtcacatgcgtggtggtggacgtgagccacgaagaccctgaggtcaagttcaactggtacgtggacggcgtggaggtgcataatgccaagacaaagccgcgggaggagcagtacaacagcacgtaccgtgtggtcagcgtcctcaccgtcctgcaccaggactggctgaatggcaaggagtacaagtgcgcggtctccaacaaagccctcccagcccccatcgagaaaaccatctccaaagccaaagggcagccccgagaaccacaggtgtacaccctgcccccatcccgggatgagctgaccaagaaccaggtcagcctgacctgcctggtcaaaggcttctatcccagcgacatcgccgtggagtgggagagcaatgggcagccggagaacaactacaagaccacgcctcccgtgctggactccgacggctccttcttcctctatagcaagctcaccgtggacaagagcaggtggcagcaggggaacgtcttctcatgctccgtgatgcatgaggctctgcacaaccactacacgcagaagagcctctccctgtctccgggtggcggtggagggtccggcggtggtggatccgaggtgcagctgttggagtctgggggaggcttggtacagcctggggggtccctgagactctcctgtgcagcctctggattctccttcagtagcgggtacgacatgtgctgggtccgccaggctccagggaaggggctggagtggatcgcatgcattgctgctggtagtgctggtatcacttacgacgcgaactgggcgaaaggccggttcaccatctccagagacaattccaagaacacgctgtatctgcaaatgaacagcctgagagccgaggacacggccgtatattactgtgcgagatcggcgttttcgttcgactacgccatggacctctggggccagggaaccctggtcaccgtctcgagcggtggaggcggatctggcggaggtggttccggcggtggcggctccggtggaggcggctctgacatccagatgacccagtctccttccaccctgtctgcatctgtaggagacagagtcaccatcacttgccaggccagtcagagcattagttcccacttaaactggtatcagcagaaaccagggaaagcccctaagctcctgatctataaggcatccactctggcatctggggtcccatcaaggttcagcggcagtggatctgggacagaatttactctcaccatcagcagcctgcagcctgatgattttgcaacttattactgccaacagggttatagttggggtaatgttgataatgttttcggcggagggaccaaggtggagatcaaaggcggtggagggtccggcggtggtggctccggacggtcgctggtggagtctgggggaggcttggtccagcctggggggtccctgagactctcctgtactgcctctggattcaccatcagtagctaccacatgcagtgggtccgccaggctccagggaaggggctggagtacatcggaaccattagtagtggtggtaatgtatactacgcaagctccgctagaggcagattcaccatctccagaccctcgtccaagaacacggtggatcttcaaatgaacagcctgagagccgaggacacggctgtgtattactgtgcgagagactctggttatagtgatcctatgtggggccagggaaccctggtcaccgtctcttcaggcggtggcggtagtgggggaggcggttctggcggcggagggtccggcggtggaggatcagacgttgtgatgacccagtctccatcttccgtgtctgcatctgtaggagacagagtcaccatcacctgtcaggccagtcagaacattaggacttacttatcctggtatcagcagaaaccagggaaagcccctaagctcctgatctatgctgcagccaatctggcatctggggtcccatcaaggttcagcggcagtggatctgggacagatttcactctcaccatcagcgacctggagcctggcgatgctgcaacttactattgtcagtctacctatcttggtactgattatgttggcggtgctttcggcggagggaccaaggtggagatcaaatga

SEQ ID NO: 122 - protein, 1228 aa, Artificial Sequence
  Synthesized
DVVMTQSPSTLSASVGDRVTINCQASESISSWLAWYQQKPGKAPKLLIYEASKLASGVPSRFSGSGSGTEFTLTISSLQPDDFATYYCQGYFYFISRTYVNSFGGGTKVEIKGGGGSGGGGSGGGGSGGGGSEVQLVESGGGLVQPGGSLRLSCAASGFTISTNAMSWVRQAPGKGLEWIGVITGRDITYYASWAKGRFTISRDNSKNTLYLQMNSLRAEDTAVYYCARDGGSSAITSNNIWGQGTLVTVSTGGGGSGGGGSQVQLQQPGAELVRPGASVKLSCKASGYTFTSYWINWVKQRPGQGLEWIGNIYPSDSYTNYNQKFKDKATLTVDKSSSTAYMQLSSPTSEDSAVYYCTRSWRGNSFDYWGQGTTLTVSSASTKGPSVFPLAPSSKSTSGGTAALGCLVKDYFPEPVTVSWNSGALTSGVHTFPAVLQSSGLYSLSSVVTVPSSSLGTQTYICNVNHKPSNTKVDKRVEPKSCDKTHTCPPCPAPEAAGAPSVFLFPPKPKDTLMISRTPEVTCVVVDVSHEDPEVKFNWYVDGVEVHNAKTKPREEQYNSTYRVVSVLTVLHQDWLNGKEYKCAVSNKALPAPIEKTISKAKGQPREPQVYTLPPSRDELTKNQVSLTCLVKGFYPSDIAVEWESNGQPENNYKTTPPVLDSDGSFFLYSKLTVDKSRWQQGNVFSCSVMHEALHNHYTQKSLSLSPGGGGGSGGGGSEVQLLESGGGLVQPGGSLRLSCAASGFSFSSGYDMCWVRQAPGKGLEWIACIAAGSAGITYDANWAKGRFTISRDNSKNTLYLQMNSLRAEDTAVYYCARSAFSFDYAMDLWGQGTLVTVSSGGGGSGGGGSGGGGSGGGGSDIQMTQSPSTLSASVGDRVTITCQASQSISSHLNWYQQKPGKAPKLLIYKASTLASGVPSRFSGSGSGTEFTLTISSLQPDDFATYYCQQGYSWGNVDNVFGGGTKVEIKGGGGSGGGGSGRSLVESGGGLVQPGGSLRLSCTASGFTISSYHMQWVRQAPGKGLEYIGTISSGGNVYYASSARGRFTISRPSSKNTVDLQMNSLRAEDTAVYYCARDSGYSDPMWGQGTLVTVSSGGGGSGGGGSGGGGSGGGGSDVVMTQSPSSVSASVGDRVTITCQASQNIRTYLSWYQQKPGKAPKLLIYAAANLASGVPSRFSGSGSGTDFTLTISDLEPGDAATYYCQSTYLGTDYVGGAFGGGTKVEIK

SEQ ID NO: 123 - DNA, 663 bp, Artificial Sequence
  Synthesized
gacattgtgatgacacagtctccatcctccctgactgtgacagcaggagagaaggtcactatgagctgcaagtccagtcagagtctgttaaacagtggaaatcaaaagaactacttgacctggtaccagcagaaaccagggcagcctcctaaactgttgatctactgggcatccactagggaatctggggtccctgatcgcttcacaggcagtggatctggaacagatttcactctcaccatcagcagtgtgcaggctgaagacctggcagtttattactgtcagaatgattatagttatccattcacgttcggctcggggacaaagttggaaataaaacgtacggtggctgcaccatctgtcttcatcttcccgccatctgatgagcagttgaaatctggaactgcctctgttgtgtgcctgctgaataacttctatcccagagaggccaaagtacagtggaaggtggataacgccctccaatcgggtaactcccaggagagtgtcacagagcaggacagcaaggacagcacctacagcctcagcagcaccctgacgctgagcaaagcagactacgagaaacacaaagtctacgcctgcgaagtcacccatcagggcctgagctcgcccgtcacaaagagcttcaacaggggagagtgttag

SEQ ID NO: 124 - protein, 220 aa, Artificial Sequence
  Synthesized
DIVMTQSPSSLTVTAGEKVTMSCKSSQSLLNSGNQKNYLTWYQQKPGQPPKLLIYWASTRESGVPDRFTGSGSGTDFTLTISSVQAEDLAVYYCQNDYSYPFTFGSGTKLEIKRTVAAPSVFIFPPSDEQLKSGTASVVCLLNNFYPREAKVQWKVDNALQSGNSQESVTEQDSKDSTYSLSSTLTLSKADYEKHKVYACEVTHQGLSSPVTKSFNRGEC

SEQ ID NO: 125 - DNA, 3687 bp, Artificial Sequence
  Synthesized
gacgtcgtgatgacccagtctccttccaccctgtctgcatctgtaggagacagagtcaccatcaattgccaagccagtgagagcattagcagttggttagcctggtatcagcagaaaccagggaaagcccctaagctcctgatctatgaagcatccaaactggcatctggggtcccatcaaggttcagcggcagtggatctgggacagaatttactctcaccatcagcagcctgcagcctgatgattttgcaacttattactgccaaggctatttttattttattagtcgtacttatgtaaattctttcggctgtgggaccaaggtggagatcaaaggtggaggcggttcaggcggaggtggaagtggtggtggcggctctggaggcggcggatctgaggtgcagctggtggagtctgggggaggcttggtccagcctggggggtccctgagactctcctgtgcagcctctggattcaccatcagtaccaatgcaatgagctgggtccgccaggctccagggaagtgcctggagtggatcggagtcattactggtcgtgatatcacatactacgcgagctgggcgaaaggcagattcaccatctccagagacaattccaagaacacgctgtatcttcaaatgaacagcctgagagccgaggacacggctgtgtattactgtgcgagagacggtggttcttctgctattactagtaacaacatttggggccagggaaccctggtcaccgtgtcgacaggcggtggagggtccggcggtggtggatcacaggtccaactgcagcagcctggggctgagctggtgaggcctggggcttcagtgaagctgtcctgcaaggcttctggctacaccttcaccagctactggataaactgggtgaagcagaggcctggacaaggccttgagtggatcggaaatatttatccttctgatagttatactaactacaatcaaaagttcaaggacaaggccacattgactgtagacaaatcctccagcacagcctacatgcagctcagcagcccgacatctgaggactctgcggtctattactgtacaagatcgtggaggggtaactcctttgactactggggccaaggcaccactctcacagtctcctcagctagcaccaagggcccatcggtcttccccctggcaccctcctccaagagcacctctgggggcacagcggccctgggctgcctggtcaaggactacttccccgaaccggtgacggtgtcgtggaactcaggcgccctgaccagcggcgtgcacaccttcccggctgtcctacagtcctcaggactctactccctcagcagcgtggtgaccgtgccctccagcagcttgggcacccagacctacatctgcaacgtgaatcacaagcccagcaacaccaaggtggacaagagagttgagcccaaatcttgtgacaaaactcacacatgcccaccgtgcccagcacctgaagccgcggggggaccgtcagtcttcctcttccccccaaaacccaaggacaccctcatgatctcccggacccctgaggtcacatgcgtggtggtggacgtgagccacgaagaccctgaggtcaagttcaactggtacgtggacggcgtggaggtgcataatgccaagacaaagccgcgggaggagcagtacgccagcacgtaccgtgtggtcagcgtcctcaccgtcctgcaccaggactggctgaatggcaaggagtacaagtgcgcggtctccaacaaagccctcccagcccccatcgagaaaaccatctccaaagccaaagggcagccccgagaaccacaggtgtacaccctgcccccatcccgggatgagctgaccaagaaccaggtcagcctgacctgcctggtcaaaggcttctatcccagcgacatcgccgtggagtgggagagcaatgggcagccggagaacaactacaagaccacgcctcccgtgctggactccgacggctccttcttcctctatagcaagctcaccgtggacaagagcaggtggcagcaggggaacgtcttctcatgctccgtgatgcatgaggctctgcacaaccactacacgcagaagagcctctccctgtctccgggtggcggtggagggtccggcggtggtggatccgaggtgcagctgttggagtctgggggaggcttggtacagcctggggggtccctgagactctcctgtgcagcctctggattctccttcagtagcgggtacgacatgtgctgggtccgccaggctccagggaagtgcctggagtggatcgcatgcattgctgctggtagtgctggtatcacttacgacgcgaactgggcgaaaggccggttcaccatctccagagacaattccaagaacacgctgtatctgcaaatgaacagcctgagagccgaggacacggccgtatattactgtgcgagatcggcgttttcgttcgactacgccatggacctctggggccagggaaccctggtcaccgtctcgagcggtggaggcggttcaggcggaggtggaagtggtggtggcggctctggaggcggcggatctgacatccagatgacccagtctccttccaccctgtctgcatctgtaggagacagagtcaccatcacttgccaggccagtcagagcattagttcccacttaaactggtatcagcagaaaccagggaaagcccctaagctcctgatctataaggcatccactctggcatctggggtcccatcaaggttcagcggcagtggatctgggacagaatttactctcaccatcagcagcctgcagcctgatgattttgcaacttattactgccaacagggttatagttggggtaatgttgataatgttttcggctgcgggaccaaggtggagatcaaaggtggtggcggctctggaggaggagggtccggacggtcgctggtggagtctgggggaggcttggtccagcctggggggtccctgagactctcctgtactgcctctggattcaccatcagtagctaccacatgcagtgggtccggcaggcacctgggaagtgcctggagtacatcggaaccattagtagtggtggtaatgtatactacgcaagctccgctagaggcagattcaccatctccagaccctcgtccaagaacacggtggatcttcaaatgaacagcctgagagccgaggacacggctgtgtattactgtgcgagagactctggttatagtgatcctatgtggggccagggaaccctggtcaccgtctcttcaggcggtggcggtagtgggggaggcggttctggcggcggagggtccggcggtggaggatcagacgttgtgatgacccagtctccatcttccgtgtctgcatctgtaggagacagagtcaccatcacctgtcaggccagtcagaacattaggacttacttatcctggtatcagcagaaaccagggaaagcccctaagctcctgatctatgctgcagccaatctggcatctggggtcccatcaaggttcagcggcagtggatctgggacagatttcactctcaccatcagcgacttggaacctggcgatgctgcaacttactattgtcagtctacctatcttggtactgattatgttggcggtgctttcggctgtgggaccaaggtggagatcaaatga

SEQ ID NO: 126 - protein, 1228 aa, Artificial Sequence
  Synthesized
DVVMTQSPSTLSASVGDRVTINCQASESISSWLAWYQQKPGKAPKLLIYEASKLASGVPSRFSGSGSGTEFTLTISSLQPDDFATYYCQGYFYFISRTYVNSFGCGTKVEIKGGGGSGGGGSGGGGSGGGGSEVQLVESGGGLVQPGGSLRLSCAASGFTISTNAMSWVRQAPGKCLEWIGVITGRDITYYASWAKGRFTISRDNSKNTLYLQMNSLRAEDTAVYYCARDGGSSAITSNNIWGQGTLVTVSTGGGGSGGGGSQVQLQQPGAELVRPGASVKLSCKASGYTFTSYWINWVKQRPGQGLEWIGNIYPSDSYTNYNQKFKDKATLTVDKSSSTAYMQLSSPTSEDSAVYYCTRSWRGNSFDYWGQGTTLTVSSASTKGPSVFPLAPSSKSTSGGTAALGCLVKDYFPEPVTVSWNSGALTSGVHTFPAVLQSSGLYSLSSVVTVPSSSLGTQTYICNVNHKPSNTKVDKRVEPKSCDKTHTCPPCPAPEAAGGPSVFLFPPKPKDTLMISRTPEVTCVVVDVSHEDPEVKFNWYVDGVEVHNAKTKPREEQYASTYRVVSVLTVLHQDWLNGKEYKCAVSNKALPAPIEKTISKAKGQPREPQVYTLPPSRDELTKNQVSLTCLVKGFYPSDIAVEWESNGQPENNYKTTPPVLDSDGSFFLYSKLTVDKSRWQQGNVFSCSVMHEALHNHYTQKSLSLSPGGGGGSGGGGSEVQLLESGGGLVQPGGSLRLSCAASGFSFSSGYDMCWVRQAPGKCLEWIACIAAGSAGITYDANWAKGRFTISRDNSKNTLYLQMNSLRAEDTAVYYCARSAFSFDYAMDLWGQGTLVTVSSGGGGSGGGGSGGGGSGGGGSDIQMTQSPSTLSASVGDRVTITCQASQSISSHLNWYQQKPGKAPKLLIYKASTLASGVPSRFSGSGSGTEFTLTISSLQPDDFATYYCQQGYSWGNVDNVFGCGTKVEIKGGGGSGGGGSGRSLVESGGGLVQPGGSLRLSCTASGFTISSYHMQWVRQAPGKCLEYIGTISSGGNVYYASSARGRFTISRPSSKNTVDLQMNSLRAEDTAVYYCARDSGYSDPMWGQGTLVTVSSGGGGSGGGGSGGGGSGGGGSDVVMTQSPSSVSASVGDRVTITCQASQNIRTYLSWYQQKPGKAPKLLIYAAANLASGVPSRFSGSGSGTDFTLTISDLEPGDAATYYCQSTYLGTDYVGGAFGCGTKVEIK

SEQ ID NO: 127 - DNA, 3696 bp, Artificial Sequence
  Synthesized
gacgtcgtgatgacccagtctccttccaccctgtctgcatctgtaggagacagagtcaccatcaattgccaagccagtgagagcattagcagttggttagcctggtatcagcagaaaccagggaaagcccctaagctcctgatctatgaagcatccaaactggcatctggggtcccatcaaggttcagcggcagtggatctgggacagaatttactctcaccatcagcagcctgcagcctgatgattttgcaacttattactgccaaggctatttttattttattagtcgtacttatgtaaattctttcggcggagggaccaaggtggagatcaaaggcggtggcggtagtgggggaggcggttctggcggcggagggtccggcggtggaggatcagaggtgcagctggtggagtctgggggaggcttggtccagcctggggggtccctgagactctcctgtgcagcctctggattcaccatcagtaccaatgcaatgagctgggtccgccaggctccagggaaggggctggagtggatcggagtcattactggtcgtgatatcacatactacgcgagctgggcgaaaggcagattcaccatctccagagacaattccaagaacacgctgtatcttcaaatgaacagcctgagagccgaggacacggctgtgtattactgtgcgagagacggtggttcttctgctattactagtaacaacatttggggccagggaaccctggtcaccgtgtcgacaggcggtggagggtccggcggtggtggatcacaggtgcagctgcagcagcccggcgccgagctggtgaagcccggcgccagcgtgaagatgagctgcaaggccagcggctacaccttcaccagctacaacatgcactgggtgaagcagacccccggccggggcctggagtggatcggcgccatctaccccggcaacggcgacaccagctacaaccagaagttcaagggcaaggccaccctgaccgccgacaagagcagcagcaccgcctacatgcagctgagcagcctgaccagcgaggacagcgccgtgtactactgcgcccggagcacctactacggcggcgactggtacttcaacgtgtggggcgccggcaccaccgtgaccgtgagcgccgctagcaccaagggcccatcggtcttccccctggcaccctcctccaagagcacctctgggggcacagcggccctgggctgcctggtcaaggactacttccccgaaccggtgacggtgtcgtggaactcaggcgccctgaccagcggcgtgcacaccttcccggctgtcctacagtcctcaggactctactccctcagcagcgtggtgaccgtgccctccagcagcttgggcacccagacctacatctgcaacgtgaatcacaagcccagcaacaccaaggtggacaagagagttgagcccaaatcttgtgacaaaactcacacatgcccaccgtgcccagcacctgaagccgcgggggcaccgtcagtcttcctcttccccccaaaacccaaggacaccctcatgatctcccggacccctgaggtcacatgcgtggtggtggacgtgagccacgaagaccctgaggtcaagttcaactggtacgtggacggcgtggaggtgcataatgccaagacaaagccgcgggaggagcagtacaacagcacgtaccgtgtggtcagcgtcctcaccgtcctgcaccaggactggctgaatggcaaggagtacaagtgcgcggtctccaacaaagccctcccagcccccatcgagaaaaccatctccaaagccaaagggcagccccgagaaccacaggtgtacaccctgcccccatcccgggatgagctgaccaagaaccaggtcagcctgacctgcctggtcaaaggcttctatcccagcgacatcgccgtggagtgggagagcaatgggcagccggagaacaactacaagaccacgcctcccgtgctggactccgacggctccttcttcctctatagcaagctcaccgtggacaagagcaggtggcagcaggggaacgtcttctcatgctccgtgatgcatgaggctctgcacaaccactacacgcagaagagcctctccctgtctccgggtggcggtggagggtccggcggtggtggatccgaggtgcagctgttggagtctgggggaggcttggtacagcctggggggtccctgagactctcctgtgcagcctctggattctccttcagtagcgggtacgacatgtgctgggtccgccaggctccagggaaggggctggagtggatcgcatgcattgctgctggtagtgctggtatcacttacgacgcgaactgggcgaaaggccggttcaccatctccagagacaattccaagaacacgctgtatctgcaaatgaacagcctgagagccgaggacacggccgtatattactgtgcgagatcggcgttttcgttcgactacgccatggacctctggggccagggaaccctggtcaccgtctcgagcggtggaggcggatctggcggaggtggttccggcggtggcggctccggtggaggcggctctgacatccagatgacccagtctccttccaccctgtctgcatctgtaggagacagagtcaccatcacttgccaggccagtcagagcattagttcccacttaaactggtatcagcagaaaccagggaaagcccctaagctcctgatctataaggcatccactctggcatctggggtcccatcaaggttcagcggcagtggatctgggacagaatttactctcaccatcagcagcctgcagcctgatgattttgcaacttattactgccaacagggttatagttggggtaatgttgataatgttttcggcggagggaccaaggtggagatcaaaggcggtggagggtccggcggtggtggctccggacggtcgctggtggagtctgggggaggcttggtccagcctggggggtccctgagactctcctgtactgcctctggattcaccatcagtagctaccacatgcagtgggtccgccaggctccagggaaggggctggagtacatcggaaccattagtagtggtggtaatgtatactacgcaagctccgctagaggcagattcaccatctccagaccctcgtccaagaacacggtggatcttcaaatgaacagcctgagagccgaggacacggctgtgtattactgtgcgagagactctggttatagtgatcctatgtggggccagggaaccctggtcaccgtctcttcaggcggtggcggtagtgggggaggcggttctggcggcggagggtccggcggtggaggatcagacgttgtgatgacccagtctccatcttccgtgtctgcatctgtaggagacagagtcaccatcacctgtcaggccagtcagaacattaggacttacttatcctggtatcagcagaaaccagggaaagcccctaagctcctgatctatgctgcagccaatctggcatctggggtcccatcaaggttcagcggcagtggatctgggacagatttcactctcaccatcagcgacctggagcctggcgatgctgcaacttactattgtcagtctacctatcttggtactgattatgttggcggtgctttcggcggagggaccaaggtggagatcaaatga

SEQ ID NO: 128 - protein, 1231 aa, Artificial Sequence; identical to SEQ ID NO: 50
  Synthesized

SEQ ID NO: 129 - DNA, 642 bp, Artificial Sequence
  Synthesized
cagatcgtgctgagccagagccccgccatcctgagcgccagccccggcgagaaggtgaccatgacctgccgggccagcagcagcgtgagctacatccactggttccagcagaagcccggcagcagccccaagccctggatctacgccaccagcaacctggccagcggcgtgcccgtgcggttcagcggcagcggcagcggcaccagctacagcctgaccatcagccgggtggaggccgaggacgccgccacctactactgccagcagtggaccagcaacccccccaccttcggcggcggcaccaagctggagatcaagcgtacggtggctgcaccatctgtcttcatcttcccgccatctgatgagcagttgaaatctggaactgcctctgttgtgtgcctgctgaataacttctatcccagagaggccaaagtacagtggaaggtggataacgccctccaatcgggtaactcccaggagagtgtcacagagcaggacagcaaggacagcacctacagcctcagcagcaccctgacgctgagcaaagcagactacgagaaacacaaagtctacgcctgcgaagtcacccatcagggcctgagctcgcccgtcacaaagagcttcaacaggggagagtgttag

SEQ ID NO: 130 - protein, 213 aa, Artificial Sequence
  Synthesized
QIVLSQSPAILSASPGEKVTMTCRASSSVSYIHWFQQKPGSSPKPWIYATSNLASGVPVRFSGSGSGTSYSLTISRVEAEDAATYYCQQWTSNPPTFGGGTKLEIKRTVAAPSVFIFPPSDEQLKSGTASVVCLLNNFYPREAKVQWKVDNALQSGNSQESVTEQDSKDSTYSLSSTLTLSKADYEKHKVYACEVTHQGLSSPVTKSFNRGEC

SEQ ID NO: 131 - DNA, 3696 bp, Artificial Sequence
  Synthesized
gacgtcgtgatgacccagtctccttccaccctgtctgcatctgtaggagacagagtcaccatcaattgccaagccagtgagagcattagcagttggttagcctggtatcagcagaaaccagggaaagcccctaagctcctgatctatgaagcatccaaactggcatctggggtcccatcaaggttcagcggcagtggatctgggacagaatttactctcaccatcagcagcctgcagcctgatgattttgcaacttattactgccaaggctatttttattttattagtcgtacttatgtaaattctttcggctgtgggaccaaggtggagatcaaaggtggaggcggttcaggcggaggtggaagtggtggtggcggctctggaggcggcggatctgaggtgcagctggtggagtctgggggaggcttggtccagcctggggggtccctgagactctcctgtgcagcctctggattcaccatcagtaccaatgcaatgagctgggtccgccaggctccagggaagtgcctggagtggatcggagtcattactggtcgtgatatcacatactacgcgagctgggcgaaaggcagattcaccatctccagagacaattccaagaacacgctgtatcttcaaatgaacagcctgagagccgaggacacggctgtgtattactgtgcgagagacggtggttcttctgctattactagtaacaacatttggggccagggaaccctggtcaccgtgtcgacaggcggtggagggtccggcggtggtggatcacaggtgcagctgcagcagcccggcgccgagctggtgaagcccggcgccagcgtgaagatgagctgcaaggccagcggctacaccttcaccagctacaacatgcactgggtgaagcagacccccggccggggcctggagtggatcggcgccatctaccccggcaacggcgacaccagctacaaccagaagttcaagggcaaggccaccctgaccgccgacaagagcagcagcaccgcctacatgcagctgagcagcctgaccagcgaggacagcgccgtgtactactgcgcccggagcacctactacggcggcgactggtacttcaacgtgtggggcgccggcaccaccgtgaccgtgagcgccgctagcaccaagggcccatcggtcttccccctggcaccctcctccaagagcacctctgggggcacagcggccctgggctgcctggtcaaggactacttccccgaaccggtgacggtgtcgtggaactcaggcgccctgaccagcggcgtgcacaccttcccggctgtcctacagtcctcaggactctactccctcagcagcgtggtgaccgtgccctccagcagcttgggcacccagacctacatctgcaacgtgaatcacaagcccagcaacaccaaggtggacaagagagttgagcccaaatcttgtgacaaaactcacacatgcccaccgtgcccagcacctgaagccgcggggggaccgtcagtcttcctcttccccccaaaacccaaggacaccctcatgatctcccggacccctgaggtcacatgcgtggtggtggacgtgagccacgaagaccctgaggtcaagttcaactggtacgtggacggcgtggaggtgcataatgccaagacaaagccgcgggaggagcagtacgccagcacgtaccgtgtggtcagcgtcctcaccgtcctgcaccaggactggctgaatggcaaggagtacaagtgcgcggtctccaacaaagccctcccagcccccatcgagaaaaccatctccaaagccaaagggcagccccgagaaccacaggtgtacaccctgcccccatcccgggatgagctgaccaagaaccaggtcagcctgacctgcctggtcaaaggcttctatcccagcgacatcgccgtggagtgggagagcaatgggcagccggagaacaactacaagaccacgcctcccgtgctggactccgacggctccttcttcctctatagcaagctcaccgtggacaagagcaggtggcagcaggggaacgtcttctcatgctccgtgatgcatgaggctctgcacaaccactacacgcagaagagcctctccctgtctccgggtggcggtggagggtccggcggtggtggatccgaggtgcagctgttggagtctgggggaggcttggtacagcctggggggtccctgagactctcctgtgcagcctctggattctccttcagtagcgggtacgacatgtgctgggtccgccaggctccagggaagtgcctggagtggatcgcatgcattgctgctggtagtgctggtatcacttacgacgcgaactgggcgaaaggccggttcaccatctccagagacaattccaagaacacgctgtatctgcaaatgaacagcctgagagccgaggacacggccgtatattactgtgcgagatcggcgttttcgttcgactacgccatggacctctggggccagggaaccctggtcaccgtctcgagcggtggaggcggttcaggcggaggtggaagtggtggtggcggctctggaggcggcggatctgacatccagatgacccagtctccttccaccctgtctgcatctgtaggagacagagtcaccatcacttgccaggccagtcagagcattagttcccacttaaactggtatcagcagaaaccagggaaagcccctaagctcctgatctataaggcatccactctggcatctggggtcccatcaaggttcagcggcagtggatctgggacagaatttactctcaccatcagcagcctgcagcctgatgattttgcaacttattactgccaacagggttatagttggggtaatgttgataatgttttcggctgcgggaccaaggtggagatcaaaggtggtggcggctctggaggaggagggtccggacggtcgctggtggagtctgggggaggcttggtccagcctggggggtccctgagactctcctgtactgcctctggattcaccatcagtagctaccacatgcagtgggtccggcaggcacctgggaagtgcctggagtacatcggaaccattagtagtggtggtaatgtatactacgcaagctccgctagaggcagattcaccatctccagaccctcgtccaagaacacggtggatcttcaaatgaacagcctgagagccgaggacacggctgtgtattactgtgcgagagactctggttatagtgatcctatgtggggccagggaaccctggtcaccgtctcttcaggcggtggcggtagtgggggaggcggttctggcggcggagggtccggcggtggaggatcagacgttgtgatgacccagtctccatcttccgtgtctgcatctgtaggagacagagtcaccatcacctgtcaggccagtcagaacattaggacttacttatcctggtatcagcagaaaccagggaaagcccctaagctcctgatctatgctgcagccaatctggcatctggggtcccatcaaggttcagcggcagtggatctgggacagatttcactctcaccatcagcgacttggaacctggcgatgctgcaacttactattgtcagtctacctatcttggtactgattatgttggcggtgctttcggctgtgggaccaaggtggagatcaaatga

SEQ ID NO: 132 - protein, 1231 aa, Artificial Sequence; identical to SEQ ID NO: 54
  Synthesized

SEQ ID NO: 133 - DNA, 3690 bp, Artificial Sequence
  Synthesized
gacgtcgtgatgacccagtctccttccaccctgtctgcatctgtaggagacagagtcaccatcaattgccaagccagtgagagcattagcagttggttagcctggtatcagcagaaaccagggaaagcccctaagctcctgatctatgaagcatccaaactggcatctggggtcccatcaaggttcagcggcagtggatctgggacagaatttactctcaccatcagcagcctgcagcctgatgattttgcaacttattactgccaaggctatttttattttattagtcgtacttatgtaaattctttcggcggagggaccaaggtggagatcaaaggcggtggcggtagtgggggaggcggttctggcggcggagggtccggcggtggaggatcagaggtgcagctggtggagtctgggggaggcttggtccagcctggggggtccctgagactctcctgtgcagcctctggattcaccatcagtaccaatgcaatgagctgggtccgccaggctccagggaaggggctggagtggatcggagtcattactggtcgtgatatcacatactacgcgagctgggcgaaaggcagattcaccatctccagagacaattccaagaacacgctgtatcttcaaatgaacagcctgagagccgaggacacggctgtgtattactgtgcgagagacggtggttcttctgctattactagtaacaacatttggggccagggaaccctggtcaccgtgtcgacaggcggtggagggtccggcggtggtggatcacaggtgcagctgaagcagtcaggacctggcctagtgcagccctcacagagcctgtccatcacctgcacagtctctggtttctcattaactaactatggtgtacactgggttcgccagtctccaggaaagggtctggagtggctgggagtgatatggagtggtggaaacacagactataatacacctttcacatccagactgagcatcaacaaggacaattccaagagccaagttttctttaaaatgaacagtctgcaatctaatgacacagccatatattactgtgccagagccctcacctactatgattacgagtttgcttactggggccaagggactctggtcactgtctctagcgctagcaccaagggcccatcggtcttccccctggcaccctcctccaagagcacctctgggggcacagcggccctgggctgcctggtcaaggactacttccccgaaccggtgacggtgtcgtggaactcaggcgccctgaccagcggcgtgcacaccttcccggctgtcctacagtcctcaggactctactccctcagcagcgtggtgaccgtgccctccagcagcttgggcacccagacctacatctgcaacgtgaatcacaagcccagcaacaccaaggtggacaagagagttgagcccaaatcttgtgacaaaactcacacatgcccaccgtgcccagcacctgaagccgcgggggcaccgtcagtcttcctcttccccccaaaacccaaggacaccctcatgatctcccggacccctgaggtcacatgcgtggtggtggacgtgagccacgaagaccctgaggtcaagttcaactggtacgtggacggcgtggaggtgcataatgccaagacaaagccgcgggaggagcagtacaacagcacgtaccgtgtggtcagcgtcctcaccgtcctgcaccaggactggctgaatggcaaggagtacaagtgcgcggtctccaacaaagccctcccagcccccatcgagaaaaccatctccaaagccaaagggcagccccgagaaccacaggtgtacaccctgcccccatcccgggatgagctgaccaagaaccaggtcagcctgacctgcctggtcaaaggcttctatcccagcgacatcgccgtggagtgggagagcaatgggcagccggagaacaactacaagaccacgcctcccgtgctggactccgacggctccttcttcctctatagcaagctcaccgtggacaagagcaggtggcagcaggggaacgtcttctcatgctccgtgatgcatgaggctctgcacaaccactacacgcagaagagcctctccctgtctccgggtggcggtggagggtccggcggtggtggatccgaggtgcagctgttggagtctgggggaggcttggtacagcctggggggtccctgagactctcctgtgcagcctctggattctccttcagtagcgggtacgacatgtgctgggtccgccaggctccagggaaggggctggagtggatcgcatgcattgctgctggtagtgctggtatcacttacgacgcgaactgggcgaaaggccggttcaccatctccagagacaattccaagaacacgctgtatctgcaaatgaacagcctgagagccgaggacacggccgtatattactgtgcgagatcggcgttttcgttcgactacgccatggacctctggggccagggaaccctggtcaccgtctcgagcggtggaggcggatctggcggaggtggttccggcggtggcggctccggtggaggcggctctgacatccagatgacccagtctccttccaccctgtctgcatctgtaggagacagagtcaccatcacttgccaggccagtcagagcattagttcccacttaaactggtatcagcagaaaccagggaaagcccctaagctcctgatctataaggcatccactctggcatctggggtcccatcaaggttcagcggcagtggatctgggacagaatttactctcaccatcagcagcctgcagcctgatgattttgcaacttattactgccaacagggttatagttggggtaatgttgataatgttttcggcggagggaccaaggtggagatcaaaggcggtggagggtccggcggtggtggctccggacggtcgctggtggagtctgggggaggcttggtccagcctggggggtccctgagactctcctgtactgcctctggattcaccatcagtagctaccacatgcagtgggtccgccaggctccagggaaggggctggagtacatcggaaccattagtagtggtggtaatgtatactacgcaagctccgctagaggcagattcaccatctccagaccctcgtccaagaacacggtggatcttcaaatgaacagcctgagagccgaggacacggctgtgtattactgtgcgagagactctggttatagtgatcctatgtggggccagggaaccctggtcaccgtctcttcaggcggtggcggtagtgggggaggcggttctggcggcggagggtccggcggtggaggatcagacgttgtgatgacccagtctccatcttccgtgtctgcatctgtaggagacagagtcaccatcacctgtcaggccagtcagaacattaggacttacttatcctggtatcagcagaaaccagggaaagcccctaagctcctgatctatgctgcagccaatctggcatctggggtcccatcaaggttcagcggcagtggatctgggacagatttcactctcaccatcagcgacctggagcctggcgatgctgcaacttactattgtcagtctacctatcttggtactgattatgttggcggtgctttcggcggagggaccaaggtggagatcaaatga

SEQ ID NO: 134 - protein, 1229 aa, Artificial Sequence; identical to SEQ ID NO: 34
  Synthesized

SEQ ID NO: 135 - DNA, 645 bp, Artificial Sequence
  Synthesized
gacatcttgctgactcagtctccagtcatcctgtctgtgagtccaggagaaagagtcagtttctcctgcagggccagtcagagtattggcacaaacatacactggtatcagcaaagaacaaatggttctccaaggcttctcataaagtatgcttctgagtctatctctgggattccttccaggtttagtggcagtggatcagggacagattttactcttagcatcaacagtgtggagtctgaagatattgcagattattactgtcaacaaaataataactggccaaccacgttcggtgctgggaccaagctggagctgaaacgtacggtggctgcaccatctgtcttcatcttcccgccatctgatgagcagttgaaatctggaactgcctctgttgtgtgcctgctgaataacttctatcccagagaggccaaagtacagtggaaggtggataacgccctccaatcgggtaactcccaggagagtgtcacagagcaggacagcaaggacagcacctacagcctcagcagcaccctgacgctgagcaaagcagactacgagaaacacaaagtctacgcctgcgaagtcacccatcagggcctgagctcgcccgtcacaaagagcttcaacaggggagagtgttag

SEQ ID NO: 136 - protein, 214 aa, Artificial Sequence
  Synthesized
DILLTQSPVILSVSPGERVSFSCRASQSIGTNIHWYQQRTNGSPRLLIKYASESISGIPSRFSGSGSGTDFTLSINSVESEDIADYYCQQNNNWPTTFGAGTKLELKRTVAAPSVFIFPPSDEQLKSGTASVVCLLNNFYPREAKVQWKVDNALQSGNSQESVTEQDSKDSTYSLSSTLTLSKADYEKHKVYACEVTHQGLSSPVTKSFNRGEC

SEQ ID NO: 137 - DNA, 3690 bp, Artificial Sequence
  Synthesized
gacgtcgtgatgacccagtctccttccaccctgtctgcatctgtaggagacagagtcaccatcaattgccaagccagtgagagcattagcagttggttagcctggtatcagcagaaaccagggaaagcccctaagctcctgatctatgaagcatccaaactggcatctggggtcccatcaaggttcagcggcagtggatctgggacagaatttactctcaccatcagcagcctgcagcctgatgattttgcaacttattactgccaaggctatttttattttattagtcgtacttatgtaaattctttcggctgtgggaccaaggtggagatcaaaggtggaggcggttcaggcggaggtggaagtggtggtggcggctctggaggcggcggatctgaggtgcagctggtggagtctgggggaggcttggtccagcctggggggtccctgagactctcctgtgcagcctctggattcaccatcagtaccaatgcaatgagctgggtccgccaggctccagggaagtgcctggagtggatcggagtcattactggtcgtgatatcacatactacgcgagctgggcgaaaggcagattcaccatctccagagacaattccaagaacacgctgtatcttcaaatgaacagcctgagagccgaggacacggctgtgtattactgtgcgagagacggtggttcttctgctattactagtaacaacatttggggccagggaaccctggtcaccgtgtcgacaggcggtggagggtccggcggtggtggatcacaggtgcagctgaagcagtcaggacctggcctagtgcagccctcacagagcctgtccatcacctgcacagtctctggtttctcattaactaactatggtgtacactgggttcgccagtctccaggaaagggtctggagtggctgggagtgatatggagtggtggaaacacagactataatacacctttcacatccagactgagcatcaacaaggacaattccaagagccaagttttctttaaaatgaacagtctgcaatctaatgacacagccatatattactgtgccagagccctcacctactatgattacgagtttgcttactggggccaagggactctggtcactgtctctagcgctagcaccaagggcccatcggtcttccccctggcaccctcctccaagagcacctctgggggcacagcggccctgggctgcctggtcaaggactacttccccgaaccggtgacggtgtcgtggaactcaggcgccctgaccagcggcgtgcacaccttcccggctgtcctacagtcctcaggactctactccctcagcagcgtggtgaccgtgccctccagcagcttgggcacccagacctacatctgcaacgtgaatcacaagcccagcaacaccaaggtggacaagagagttgagcccaaatcttgtgacaaaactcacacatgcccaccgtgcccagcacctgaagccgcggggggaccgtcagtcttcctcttccccccaaaacccaaggacaccctcatgatctcccggacccctgaggtcacatgcgtggtggtggacgtgagccacgaagaccctgaggtcaagttcaactggtacgtggacggcgtggaggtgcataatgccaagacaaagccgcgggaggagcagtacgccagcacgtaccgtgtggtcagcgtcctcaccgtcctgcaccaggactggctgaatggcaaggagtacaagtgcgcggtctccaacaaagccctcccagcccccatcgagaaaaccatctccaaagccaaagggcagccccgagaaccacaggtgtacaccctgcccccatcccgggatgagctgaccaagaaccaggtcagcctgacctgcctggtcaaaggcttctatcccagcgacatcgccgtggagtgggagagcaatgggcagccggagaacaactacaagaccacgcctcccgtgctggactccgacggctccttcttcctctatagcaagctcaccgtggacaagagcaggtggcagcaggggaacgtcttctcatgctccgtgatgcatgaggctctgcacaaccactacacgcagaagagcctctccctgtctccgggtggcggtggagggtccggcggtggtggatccgaggtgcagctgttggagtctgggggaggcttggtacagcctggggggtccctgagactctcctgtgcagcctctggattctccttcagtagcgggtacgacatgtgctgggtccgccaggctccagggaagtgcctggagtggatcgcatgcattgctgctggtagtgctggtatcacttacgacgcgaactgggcgaaaggccggttcaccatctccagagacaattccaagaacacgctgtatctgcaaatgaacagcctgagagccgaggacacggccgtatattactgtgcgagatcggcgttttcgttcgactacgccatggacctctggggccagggaaccctggtcaccgtctcgagcggtggaggcggttcaggcggaggtggaagtggtggtggcggctctggaggcggcggatctgacatccagatgacccagtctccttccaccctgtctgcatctgtaggagacagagtcaccatcacttgccaggccagtcagagcattagttcccacttaaactggtatcagcagaaaccagggaaagcccctaagctcctgatctataaggcatccactctggcatctggggtcccatcaaggttcagcggcagtggatctgggacagaatttactctcaccatcagcagcctgcagcctgatgattttgcaacttattactgccaacagggttatagttggggtaatgttgataatgttttcggctgcgggaccaaggtggagatcaaaggtggtggcggctctggaggaggagggtccggacggtcgctggtggagtctgggggaggcttggtccagcctggggggtccctgagactctcctgtactgcctctggattcaccatcagtagctaccacatgcagtgggtccggcaggcacctgggaagtgcctggagtacatcggaaccattagtagtggtggtaatgtatactacgcaagctccgctagaggcagattcaccatctccagaccctcgtccaagaacacggtggatcttcaaatgaacagcctgagagccgaggacacggctgtgtattactgtgcgagagactctggttatagtgatcctatgtggggccagggaaccctggtcaccgtctcttcaggcggtggcggtagtgggggaggcggttctggcggcggagggtccggcggtggaggatcagacgttgtgatgacccagtctccatcttccgtgtctgcatctgtaggagacagagtcaccatcacctgtcaggccagtcagaacattaggacttacttatcctggtatcagcagaaaccagggaaagcccctaagctcctgatctatgctgcagccaatctggcatctggggtcccatcaaggttcagcggcagtggatctgggacagatttcactctcaccatcagcgacttggaacctggcgatgctgcaacttactattgtcagtctacctatcttggtactgattatgttggcggtgctttcggctgtgggaccaaggtggagatcaaatga

SEQ ID NO: 138 - protein, 1229 aa, Artificial Sequence; identical to SEQ ID NO: 38
  Synthesized

SEQ ID NO: 139 - DNA, 3690 bp, Artificial Sequence
  Synthesized
gacgtcgtgatgacccagtctccttccaccctgtctgcatctgtaggagacagagtcaccatcaattgccaagccagtgagagcattagcagttggttagcctggtatcagcagaaaccagggaaagcccctaagctcctgatctatgaagcatccaaactggcatctggggtcccatcaaggttcagcggcagtggatctgggacagaatttactctcaccatcagcagcctgcagcctgatgattttgcaacttattactgccaaggctatttttattttattagtcgtacttatgtaaattctttcggcggagggaccaaggtggagatcaaaggcggtggcggtagtgggggaggcggttctggcggcggagggtccggcggtggaggatcagaggtgcagctggtggagtctgggggaggcttggtccagcctggggggtccctgagactctcctgtgcagcctctggattcaccatcagtaccaatgcaatgagctgggtccgccaggctccagggaaggggctggagtggatcggagtcattactggtcgtgatatcacatactacgcgagctgggcgaaaggcagattcaccatctccagagacaattccaagaacacgctgtatcttcaaatgaacagcctgagagccgaggacacggctgtgtattactgtgcgagagacggtggttcttctgctattactagtaacaacatttggggccagggaaccctggtcaccgtgtcgacaggcggtggagggtccggcggtggtggatcacaggtgcagctgcaggagtcgggcccaggactggtgaagccttcggagaccctgtccctcacctgcactgtctctggtggctccgtcagcagtggtgattactactggacctggatccggcagtccccagggaagggactggagtggattggacacatctattacagtgggaacaccaattataacccctccctcaagagccgactcaccatatcaattgacacgtccaagactcagttctccctgaagctgagttctgtgaccgctgcggacacggccatttattactgtgtgcgagatcgagtgactggtgcttttgatatctggggccaagggacaatggtcaccgtctcgagcgctagcaccaagggcccatcggtcttccccctggcaccctcctccaagagcacctctgggggcacagcggccctgggctgcctggtcaaggactacttccccgaaccggtgacggtgtcgtggaactcaggcgccctgaccagcggcgtgcacaccttcccggctgtcctacagtcctcaggactctactccctcagcagcgtggtgaccgtgccctccagcagcttgggcacccagacctacatctgcaacgtgaatcacaagcccagcaacaccaaggtggacaagagagttgagcccaaatcttgtgacaaaactcacacatgcccaccgtgcccagcacctgaagccgcgggggcaccgtcagtcttcctcttccccccaaaacccaaggacaccctcatgatctcccggacccctgaggtcacatgcgtggtggtggacgtgagccacgaagaccctgaggtcaagttcaactggtacgtggacggcgtggaggtgcataatgccaagacaaagccgcgggaggagcagtacaacagcacgtaccgtgtggtcagcgtcctcaccgtcctgcaccaggactggctgaatggcaaggagtacaagtgcgcggtctccaacaaagccctcccagcccccatcgagaaaaccatctccaaagccaaagggcagccccgagaaccacaggtgtacaccctgcccccatcccgggatgagctgaccaagaaccaggtcagcctgacctgcctggtcaaaggcttctatcccagcgacatcgccgtggagtgggagagcaatgggcagccggagaacaactacaagaccacgcctcccgtgctggactccgacggctccttcttcctctatagcaagctcaccgtggacaagagcaggtggcagcaggggaacgtcttctcatgctccgtgatgcatgaggctctgcacaaccactacacgcagaagagcctctccctgtctccgggtggcggtggagggtccggcggtggtggatccgaggtgcagctgttggagtctgggggaggcttggtacagcctggggggtccctgagactctcctgtgcagcctctggattctccttcagtagcgggtacgacatgtgctgggtccgccaggctccagggaaggggctggagtggatcgcatgcattgctgctggtagtgctggtatcacttacgacgcgaactgggcgaaaggccggttcaccatctccagagacaattccaagaacacgctgtatctgcaaatgaacagcctgagagccgaggacacggccgtatattactgtgcgagatcggcgttttcgttcgactacgccatggacctctggggccagggaaccctggtcaccgtctcgagcggtggaggcggatctggcggaggtggttccggcggtggcggctccggtggaggcggctctgacatccagatgacccagtctccttccaccctgtctgcatctgtaggagacagagtcaccatcacttgccaggccagtcagagcattagttcccacttaaactggtatcagcagaaaccagggaaagcccctaagctcctgatctataaggcatccactctggcatctggggtcccatcaaggttcagcggcagtggatctgggacagaatttactctcaccatcagcagcctgcagcctgatgattttgcaacttattactgccaacagggttatagttggggtaatgttgataatgttttcggcggagggaccaaggtggagatcaaaggcggtggagggtccggcggtggtggctccggacggtcgctggtggagtctgggggaggcttggtccagcctggggggtccctgagactctcctgtactgcctctggattcaccatcagtagctaccacatgcagtgggtccgccaggctccagggaaggggctggagtacatcggaaccattagtagtggtggtaatgtatactacgcaagctccgctagaggcagattcaccatctccagaccctcgtccaagaacacggtggatcttcaaatgaacagcctgagagccgaggacacggctgtgtattactgtgcgagagactctggttatagtgatcctatgtggggccagggaaccctggtcaccgtctcttcaggcggtggcggtagtgggggaggcggttctggcggcggagggtccggcggtggaggatcagacgttgtgatgacccagtctccatcttccgtgtctgcatctgtaggagacagagtcaccatcacctgtcaggccagtcagaacattaggacttacttatcctggtatcagcagaaaccagggaaagcccctaagctcctgatctatgctgcagccaatctggcatctggggtcccatcaaggttcagcggcagtggatctgggacagatttcactctcaccatcagcgacctggagcctggcgatgctgcaacttactattgtcagtctacctatcttggtactgattatgttggcggtgctttcggcggagggaccaaggtggagatcaaatga

SEQ ID NO: 140 - protein, 1229 aa, Artificial Sequence
  Synthesized
DVVMTQSPSTLSASVGDRVTINCQASESISSWLAWYQQKPGKAPKLLIYEASKLASGVPSRFSGSGSGTEFTLTISSLQPDDFATYYCQGYFYFISRTYVNSFGGGTKVEIKGGGGSGGGGSGGGGSGGGGSEVQLVESGGGLVQPGGSLRLSCAASGFTISTNAMSWVRQAPGKGLEWIGVITGRDITYYASWAKGRFTISRDNSKNTLYLQMNSLRAEDTAVYYCARDGGSSAITSNNIWGQGTLVTVSTGGGGSGGGGSQVQLQESGPGLVKPSETLSLTCTVSGGSVSSGDYYWTWIRQSPGKGLEWIGHIYYSGNTNYNPSLKSRLTISIDTSKTQFSLKLSSVTAADTAIYYCVRDRVTGAFDIWGQGTMVTVSSASTKGPSVFPLAPSSKSTSGGTAALGCLVKDYFPEPVTVSWNSGALTSGVHTFPAVLQSSGLYSLSSVVTVPSSSLGTQTYICNVNHKPSNTKVDKRVEPKSCDKTHTCPPCPAPEAAGAPSVFLFPPKPKDTLMISRTPEVTCVVVDVSHEDPEVKFNWYVDGVEVHNAKTKPREEQYNSTYRVVSVLTVLHQDWLNGKEYKCAVSNKALPAPIEKTISKAKGQPREPQVYTLPPSRDELTKNQVSLTCLVKGFYPSDIAVEWESNGQPENNYKTTPPVLDSDGSFFLYSKLTVDKSRWQQGNVFSCSVMHEALHNHYTQKSLSLSPGGGGGSGGGGSEVQLLESGGGLVQPGGSLRLSCAASGFSFSSGYDMCWVRQAPGKGLEWIACIAAGSAGITYDANWAKGRFTISRDNSKNTLYLQMNSLRAEDTAVYYCARSAFSFDYAMDLWGQGTLVTVSSGGGGSGGGGSGGGGSGGGGSDIQMTQSPSTLSASVGDRVTITCQASQSISSHLNWYQQKPGKAPKLLIYKASTLASGVPSRFSGSGSGTEFTLTISSLQPDDFATYYCQQGYSWGNVDNVFGGGTKVEIKGGGGSGGGGSGRSLVESGGGLVQPGGSLRLSCTASGFTISSYHMQWVRQAPGKGLEYIGTISSGGNVYYASSARGRFTISRPSSKNTVDLQMNSLRAEDTAVYYCARDSGYSDPMWGQGTLVTVSSGGGGSGGGGSGGGGSGGGGSDVVMTQSPSSVSASVGDRVTITCQASQNIRTYLSWYQQKPGKAPKLLIYAAANLASGVPSRFSGSGSGTDFTLTISDLEPGDAATYYCQSTYLGTDYVGGAFGGGTKVEIK

SEQ ID NO: 141 - DNA, 645 bp, Artificial Sequence
  Synthesized
gacatccagatgacccagtctccatcctccctgtctgcatctgtaggagacagagtcaccatcacttgccaggcgagtcaggacatcagcaactatttaaattggtatcagcagaaaccagggaaagcccctaaactcctgatctacgatgcatccaatttggaaacaggggtcccatcaaggttcagtggaagtggatctgggacagattttactttcaccatcagcagcctgcagcctgaagatattgcaacatatttctgtcaacactttgatcatctcccgctcgctttcggcggagggaccaaggtggaaattaaacgtacggtggctgcaccatctgtcttcatcttcccgccatctgatgagcagttgaaatctggaactgcctctgttgtgtgcctgctgaataacttctatcccagagaggccaaagtacagtggaaggtggataacgccctccaatcgggtaactcccaggagagtgtcacagagcaggacagcaaggacagcacctacagcctcagcagcaccctgacgctgagcaaagcagactacgagaaacacaaagtctacgcctgcgaagtcacccatcagggcctgagctcgcccgtcacaaagagcttcaacaggggagagtgttag

SEQ ID NO: 142 - protein, 214 aa, Artificial Sequence
  Synthesized
DIQMTQSPSSLSASVGDRVTITCQASQDISNYLNWYQQKPGKAPKLLIYDASNLETGVPSRFSGSGSGTDFTFTISSLQPEDIATYFCQHFDHLPLAFGGGTKVEIKRTVAAPSVFIFPPSDEQLKSGTASVVCLLNNFYPREAKVQWKVDNALQSGNSQESVTEQDSKDSTYSLSSTLTLSKADYEKHKVYACEVTHQGLSSPVTKSFNRGEC

SEQ ID NO: 143 - DNA, 3690 bp, Artificial Sequence
  Synthesized
gacgtcgtgatgacccagtctccttccaccctgtctgcatctgtaggagacagagtcaccatcaattgccaagccagtgagagcattagcagttggttagcctggtatcagcagaaaccagggaaagcccctaagctcctgatctatgaagcatccaaactggcatctggggtcccatcaaggttcagcggcagtggatctgggacagaatttactctcaccatcagcagcctgcagcctgatgattttgcaacttattactgccaaggctatttttattttattagtcgtacttatgtaaattctttcggctgtgggaccaaggtggagatcaaaggtggaggcggttcaggcggaggtggaagtggtggtggcggctctggaggcggcggatctgaggtgcagctggtggagtctgggggaggcttggtccagcctggggggtccctgagactctcctgtgcagcctctggattcaccatcagtaccaatgcaatgagctgggtccgccaggctccagggaagtgcctggagtggatcggagtcattactggtcgtgatatcacatactacgcgagctgggcgaaaggcagattcaccatctccagagacaattccaagaacacgctgtatcttcaaatgaacagcctgagagccgaggacacggctgtgtattactgtgcgagagacggtggttcttctgctattactagtaacaacatttggggccagggaaccctggtcaccgtgtcgacaggcggtggagggtccggcggtggtggatcacaggtgcagctgcaggagtcgggcccaggactggtgaagccttcggagaccctgtccctcacctgcactgtctctggtggctccgtcagcagtggtgattactactggacctggatccggcagtccccagggaagggactggagtggattggacacatctattacagtgggaacaccaattataacccctccctcaagagccgactcaccatatcaattgacacgtccaagactcagttctccctgaagctgagttctgtgaccgctgcggacacggccatttattactgtgtgcgagatcgagtgactggtgcttttgatatctggggccaagggacaatggtcaccgtctcgagcgctagcaccaagggcccatcggtcttccccctggcaccctcctccaagagcacctctgggggcacagcggccctgggctgcctggtcaaggactacttccccgaaccggtgacggtgtcgtggaactcaggcgccctgaccagcggcgtgcacaccttcccggctgtcctacagtcctcaggactctactccctcagcagcgtggtgaccgtgccctccagcagcttgggcacccagacctacatctgcaacgtgaatcacaagcccagcaacaccaaggtggacaagagagttgagcccaaatcttgtgacaaaactcacacatgcccaccgtgcccagcacctgaagccgcggggggaccgtcagtcttcctcttccccccaaaacccaaggacaccctcatgatctcccggacccctgaggtcacatgcgtggtggtggacgtgagccacgaagaccctgaggtcaagttcaactggtacgtggacggcgtggaggtgcataatgccaagacaaagccgcgggaggagcagtacgccagcacgtaccgtgtggtcagcgtcctcaccgtcctgcaccaggactggctgaatggcaaggagtacaagtgcgcggtctccaacaaagccctcccagcccccatcgagaaaaccatctccaaagccaaagggcagccccgagaaccacaggtgtacaccctgcccccatcccgggatgagctgaccaagaaccaggtcagcctgacctgcctggtcaaaggcttctatcccagcgacatcgccgtggagtgggagagcaatgggcagccggagaacaactacaagaccacgcctcccgtgctggactccgacggctccttcttcctctatagcaagctcaccgtggacaagagcaggtggcagcaggggaacgtcttctcatgctccgtgatgcatgaggctctgcacaaccactacacgcagaagagcctctccctgtctccgggtggcggtggagggtccggcggtggtggatccgaggtgcagctgttggagtctgggggaggcttggtacagcctggggggtccctgagactctcctgtgcagcctctggattctccttcagtagcgggtacgacatgtgctgggtccgccaggctccagggaagtgcctggagtggatcgcatgcattgctgctggtagtgctggtatcacttacgacgcgaactgggcgaaaggccggttcaccatctccagagacaattccaagaacacgctgtatctgcaaatgaacagcctgagagccgaggacacggccgtatattactgtgcgagatcggcgttttcgttcgactacgccatggacctctggggccagggaaccctggtcaccgtctcgagcggtggaggcggttcaggcggaggtggaagtggtggtggcggctctggaggcggcggatctgacatccagatgacccagtctccttccaccctgtctgcatctgtaggagacagagtcaccatcacttgccaggccagtcagagcattagttcccacttaaactggtatcagcagaaaccagggaaagcccctaagctcctgatctataaggcatccactctggcatctggggtcccatcaaggttcagcggcagtggatctgggacagaatttactctcaccatcagcagcctgcagcctgatgattttgcaacttattactgccaacagggttatagttggggtaatgttgataatgttttcggctgcgggaccaaggtggagatcaaaggtggtggcggctctggaggaggagggtccggacggtcgctggtggagtctgggggaggcttggtccagcctggggggtccctgagactctcctgtactgcctctggattcaccatcagtagctaccacatgcagtgggtccggcaggcacctgggaagtgcctggagtacatcggaaccattagtagtggtggtaatgtatactacgcaagctccgctagaggcagattcaccatctccagaccctcgtccaagaacacggtggatcttcaaatgaacagcctgagagccgaggacacggctgtgtattactgtgcgagagactctggttatagtgatcctatgtggggccagggaaccctggtcaccgtctcttcaggcggtggcggtagtgggggaggcggttctggcggcggagggtccggcggtggaggatcagacgttgtgatgacccagtctccatcttccgtgtctgcatctgtaggagacagagtcaccatcacctgtcaggccagtcagaacattaggacttacttatcctggtatcagcagaaaccagggaaagcccctaagctcctgatctatgctgcagccaatctggcatctggggtcccatcaaggttcagcggcagtggatctgggacagatttcactctcaccatcagcgacttggaacctggcgatgctgcaacttactattgtcagtctacctatcttggtactgattatgttggcggtgctttcggctgtgggaccaaggtggagatcaaatga

SEQ ID NO: 144 - protein, 1229 aa, Artificial Sequence; identical to SEQ ID NO: 42
  Synthesized

SEQ ID NO: 145 - DNA, 3702 bp, Artificial Sequence
  Synthesized
gacgtcgtgatgacccagtctccttccaccctgtctgcatctgtaggagacagagtcaccatcaattgccaagccagtgagagcattagcagttggttagcctggtatcagcagaaaccagggaaagcccctaagctcctgatctatgaagcatccaaactggcatctggggtcccatcaaggttcagcggcagtggatctgggacagaatttactctcaccatcagcagcctgcagcctgatgattttgcaacttattactgccaaggctatttttattttattagtcgtacttatgtaaattctttcggcggagggaccaaggtggagatcaaaggcggtggcggtagtgggggaggcggttctggcggcggagggtccggcggtggaggatcagaggtgcagctggtggagtctgggggaggcttggtccagcctggggggtccctgagactctcctgtgcagcctctggattcaccatcagtaccaatgcaatgagctgggtccgccaggctccagggaaggggctggagtggatcggagtcattactggtcgtgatatcacatactacgcgagctgggcgaaaggcagattcaccatctccagagacaattccaagaacacgctgtatcttcaaatgaacagcctgagagccgaggacacggctgtgtattactgtgcgagagacggtggttcttctgctattactagtaacaacatttggggccagggaaccctggtcaccgtgtcgacaggcggtggagggtccggcggtggtggatcacaggtgcagctgcagcagagcggcgccgaggtgaagaagcccggcagcagcgtgaaggtgagctgcaaggccagcggctacaccttcaccaactactacatctactgggtgcggcaggcccccggccagggcctggagtggatcggcggcatcaaccccaccagcggcggcagcaacttcaacgagaagttcaagacccgggtgaccatcaccgccgacgagagcagcaccaccgcctacatggagctgagcagcctgcggagcgaggacaccgccttctacttctgcacccggcagggcctgtggttcgacagcgacggccggggcttcgacttctggggccagggcaccaccgtgaccgtgagcagcgctagcaccaagggcccatcggtcttccccctggcaccctcctccaagagcacctctgggggcacagcggccctgggctgcctggtcaaggactacttccccgaaccggtgacggtgtcgtggaactcaggcgccctgaccagcggcgtgcacaccttcccggctgtcctacagtcctcaggactctactccctcagcagcgtggtgaccgtgccctccagcagcttgggcacccagacctacatctgcaacgtgaatcacaagcccagcaacaccaaggtggacaagagagttgagcccaaatcttgtgacaaaactcacacatgcccaccgtgcccagcacctgaagccgcgggggcaccgtcagtcttcctcttccccccaaaacccaaggacaccctcatgatctcccggacccctgaggtcacatgcgtggtggtggacgtgagccacgaagaccctgaggtcaagttcaactggtacgtggacggcgtggaggtgcataatgccaagacaaagccgcgggaggagcagtacaacagcacgtaccgtgtggtcagcgtcctcaccgtcctgcaccaggactggctgaatggcaaggagtacaagtgcgcggtctccaacaaagccctcccagcccccatcgagaaaaccatctccaaagccaaagggcagccccgagaaccacaggtgtacaccctgcccccatcccgggatgagctgaccaagaaccaggtcagcctgacctgcctggtcaaaggcttctatcccagcgacatcgccgtggagtgggagagcaatgggcagccggagaacaactacaagaccacgcctcccgtgctggactccgacggctccttcttcctctatagcaagctcaccgtggacaagagcaggtggcagcaggggaacgtcttctcatgctccgtgatgcatgaggctctgcacaaccactacacgcagaagagcctctccctgtctccgggtggcggtggagggtccggcggtggtggatccgaggtgcagctgttggagtctgggggaggcttggtacagcctggggggtccctgagactctcctgtgcagcctctggattctccttcagtagcgggtacgacatgtgctgggtccgccaggctccagggaaggggctggagtggatcgcatgcattgctgctggtagtgctggtatcacttacgacgcgaactgggcgaaaggccggttcaccatctccagagacaattccaagaacacgctgtatctgcaaatgaacagcctgagagccgaggacacggccgtatattactgtgcgagatcggcgttttcgttcgactacgccatggacctctggggccagggaaccctggtcaccgtctcgagcggtggaggcggatctggcggaggtggttccggcggtggcggctccggtggaggcggctctgacatccagatgacccagtctccttccaccctgtctgcatctgtaggagacagagtcaccatcacttgccaggccagtcagagcattagttcccacttaaactggtatcagcagaaaccagggaaagcccctaagctcctgatctataaggcatccactctggcatctggggtcccatcaaggttcagcggcagtggatctgggacagaatttactctcaccatcagcagcctgcagcctgatgattttgcaacttattactgccaacagggttatagttggggtaatgttgataatgttttcggcggagggaccaaggtggagatcaaaggcggtggagggtccggcggtggtggctccggacggtcgctggtggagtctgggggaggcttggtccagcctggggggtccctgagactctcctgtactgcctctggattcaccatcagtagctaccacatgcagtgggtccgccaggctccagggaaggggctggagtacatcggaaccattagtagtggtggtaatgtatactacgcaagctccgctagaggcagattcaccatctccagaccctcgtccaagaacacggtggatcttcaaatgaacagcctgagagccgaggacacggctgtgtattactgtgcgagagactctggttatagtgatcctatgtggggccagggaaccctggtcaccgtctcttcaggcggtggcggtagtgggggaggcggttctggcggcggagggtccggcggtggaggatcagacgttgtgatgacccagtctccatcttccgtgtctgcatctgtaggagacagagtcaccatcacctgtcaggccagtcagaacattaggacttacttatcctggtatcagcagaaaccagggaaagcccctaagctcctgatctatgctgcagccaatctggcatctggggtcccatcaaggttcagcggcagtggatctgggacagatttcactctcaccatcagcgacctggagcctggcgatgctgcaacttactattgtcagtctacctatcttggtactgattatgttggcggtgctttcggcggagggaccaaggtggagatcaaatga

SEQ ID NO: 146 - protein, 1233 aa, Artificial Sequence
  Synthesized
DVVMTQSPSTLSASVGDRVTINCQASESISSWLAWYQQKPGKAPKLLIYEASKLASGVPSRFSGSGSGTEFTLTISSLQPDDFATYYCQGYFYFISRTYVNSFGGGTKVEIKGGGGSGGGGSGGGGSGGGGSEVQLVESGGGLVQPGGSLRLSCAASGFTISTNAMSWVRQAPGKGLEWIGVITGRDITYYASWAKGRFTISRDNSKNTLYLQMNSLRAEDTAVYYCARDGGSSAITSNNIWGQGTLVTVSTGGGGSGGGGSQVQLQQSGAEVKKPGSSVKVSCKASGYTFTNYYIYWVRQAPGQGLEWIGGINPTSGGSNFNEKFKTRVTITADESSTTAYMELSSLRSEDTAFYFCTRQGLWFDSDGRGFDFWGQGTTVTVSSASTKGPSVFPLAPSSKSTSGGTAALGCLVKDYFPEPVTVSWNSGALTSGVHTFPAVLQSSGLYSLSSVVTVPSSSLGTQTYICNVNHKPSNTKVDKRVEPKSCDKTHTCPPCPAPEAAGAPSVFLFPPKPKDTLMISRTPEVTCVVVDVSHEDPEVKFNWYVDGVEVHNAKTKPREEQYNSTYRVVSVLTVLHQDWLNGKEYKCAVSNKALPAPIEKTISKAKGQPREPQVYTLPPSRDELTKNQVSLTCLVKGFYPSDIAVEWESNGQPENNYKTTPPVLDSDGSFFLYSKLTVDKSRWQQGNVFSCSVMHEALHNHYTQKSLSLSPGGGGGSGGGGSEVQLLESGGGLVQPGGSLRLSCAASGFSFSSGYDMCWVRQAPGKGLEWIACIAAGSAGITYDANWAKGRFTISRDNSKNTLYLQMNSLRAEDTAVYYCARSAFSFDYAMDLWGQGTLVTVSSGGGGSGGGGSGGGGSGGGGSDIQMTQSPSTLSASVGDRVTITCQASQSISSHLNWYQQKPGKAPKLLIYKASTLASGVPSRFSGSGSGTEFTLTISSLQPDDFATYYCQQGYSWGNVDNVFGGGTKVEIKGGGGSGGGGSGRSLVESGGGLVQPGGSLRLSCTASGFTISSYHMQWVRQAPGKGLEYIGTISSGGNVYYASSARGRFTISRPSSKNTVDLQMNSLRAEDTAVYYCARDSGYSDPMWGQGTLVTVSSGGGGSGGGGSGGGGSGGGGSDVVMTQSPSSVSASVGDRVTITCQASQNIRTYLSWYQQKPGKAPKLLIYAAANLASGVPSRFSGSGSGTDFTLTISDLEPGDAATYYCQSTYLGTDYVGGAFGGGTKVEIK

SEQ ID NO: 147 - DNA, 660 bp, Artificial Sequence
  Synthesized
gatattcaaatgactcaatctccttcttctctttctgcttctgttggtgatcgtgttactattacttgtcgttcttctcaaaatattgttcattctaatggtaatacttatcttgattggtatcaacaaactcctggtaaagctcctaaacttcttatttataaagtttctaatcgtttttctggtgttccttctcgtttttctggttctggttctggtactgattttacttttactatttcttctcttcaacctgaagatattgctacttattattgttttcaatattctcatgttccttggacttttggtcaaggtactaaacttcaaattactcgtacggtggctgcaccatctgtcttcatcttcccgccatctgatgagcagttgaaatctggaactgcctctgttgtgtgcctgctgaataacttctatcccagagaggccaaagtacagtggaaggtggataacgccctccaatcgggtaactcccaggagagtgtcacagagcaggacagcaaggacagcacctacagcctcagcagcaccctgacgctgagcaaagcagactacgagaaacacaaagtctacgcctgcgaagtcacccatcagggcctgagctcgcccgtcacaaagagcttcaacaggggagagtgttag

SEQ ID NO: 148 - protein, 219 aa, Artificial Sequence
  synthesized
DIQMTQSPSSLSASVGDRVTITCRSSQNIVHSNGNTYLDWYQQTPGKAPKLLIYKVSNRFSGVPSRFSGSGSGTDFTFTISSLQPEDIATYYCFQYSHVPWTFGQGTKLQITRTVAAPSVFIFPPSDEQLKSGTASVVCLLNNFYPREAKVQWKVDNALQSGNSQESVTEQDSKDSTYSLSSTLTLSKADYEKHKVYACEVTHQGLSSPVTKSFNRGEC

SEQ ID NO: 149 - DNA, 3702 bp, Artificial Sequence
  Synthesized
gacgtcgtgatgacccagtctccttccaccctgtctgcatctgtaggagacagagtcaccatcaattgccaagccagtgagagcattagcagttggttagcctggtatcagcagaaaccagggaaagcccctaagctcctgatctatgaagcatccaaactggcatctggggtcccatcaaggttcagcggcagtggatctgggacagaatttactctcaccatcagcagcctgcagcctgatgattttgcaacttattactgccaaggctatttttattttattagtcgtacttatgtaaattctttcggctgtgggaccaaggtggagatcaaaggtggaggcggttcaggcggaggtggaagtggtggtggcggctctggaggcggcggatctgaggtgcagctggtggagtctgggggaggcttggtccagcctggggggtccctgagactctcctgtgcagcctctggattcaccatcagtaccaatgcaatgagctgggtccgccaggctccagggaagtgcctggagtggatcggagtcattactggtcgtgatatcacatactacgcgagctgggcgaaaggcagattcaccatctccagagacaattccaagaacacgctgtatcttcaaatgaacagcctgagagccgaggacacggctgtgtattactgtgcgagagacggtggttcttctgctattactagtaacaacatttggggccagggaaccctggtcaccgtgtcgacaggcggtggagggtccggcggtggtggatcacaggtgcagctgcagcagagcggcgccgaggtgaagaagcccggcagcagcgtgaaggtgagctgcaaggccagcggctacaccttcaccaactactacatctactgggtgcggcaggcccccggccagggcctggagtggatcggcggcatcaaccccaccagcggcggcagcaacttcaacgagaagttcaagacccgggtgaccatcaccgccgacgagagcagcaccaccgcctacatggagctgagcagcctgcggagcgaggacaccgccttctacttctgcacccggcagggcctgtggttcgacagcgacggccggggcttcgacttctggggccagggcaccaccgtgaccgtgagcagcgctagcaccaagggcccatcggtcttccccctggcaccctcctccaagagcacctctgggggcacagcggccctgggctgcctggtcaaggactacttccccgaaccggtgacggtgtcgtggaactcaggcgccctgaccagcggcgtgcacaccttcccggctgtcctacagtcctcaggactctactccctcagcagcgtggtgaccgtgccctccagcagcttgggcacccagacctacatctgcaacgtgaatcacaagcccagcaacaccaaggtggacaagagagttgagcccaaatcttgtgacaaaactcacacatgcccaccgtgcccagcacctgaagccgcggggggaccgtcagtcttcctcttccccccaaaacccaaggacaccctcatgatctcccggacccctgaggtcacatgcgtggtggtggacgtgagccacgaagaccctgaggtcaagttcaactggtacgtggacggcgtggaggtgcataatgccaagacaaagccgcgggaggagcagtacgccagcacgtaccgtgtggtcagcgtcctcaccgtcctgcaccaggactggctgaatggcaaggagtacaagtgcgcggtctccaacaaagccctcccagcccccatcgagaaaaccatctccaaagccaaagggcagccccgagaaccacaggtgtacaccctgcccccatcccgggatgagctgaccaagaaccaggtcagcctgacctgcctggtcaaaggcttctatcccagcgacatcgccgtggagtgggagagcaatgggcagccggagaacaactacaagaccacgcctcccgtgctggactccgacggctccttcttcctctatagcaagctcaccgtggacaagagcaggtggcagcaggggaacgtcttctcatgctccgtgatgcatgaggctctgcacaaccactacacgcagaagagcctctccctgtctccgggtggcggtggagggtccggcggtggtggatccgaggtgcagctgttggagtctgggggaggcttggtacagcctggggggtccctgagactctcctgtgcagcctctggattctccttcagtagcgggtacgacatgtgctgggtccgccaggctccagggaagtgcctggagtggatcgcatgcattgctgctggtagtgctggtatcacttacgacgcgaactgggcgaaaggccggttcaccatctccagagacaattccaagaacacgctgtatctgcaaatgaacagcctgagagccgaggacacggccgtatattactgtgcgagatcggcgttttcgttcgactacgccatggacctctggggccagggaaccctggtcaccgtctcgagcggtggaggcggttcaggcggaggtggaagtggtggtggcggctctggaggcggcggatctgacatccagatgacccagtctccttccaccctgtctgcatctgtaggagacagagtcaccatcacttgccaggccagtcagagcattagttcccacttaaactggtatcagcagaaaccagggaaagcccctaagctcctgatctataaggcatccactctggcatctggggtcccatcaaggttcagcggcagtggatctgggacagaatttactctcaccatcagcagcctgcagcctgatgattttgcaacttattactgccaacagggttatagttggggtaatgttgataatgttttcggctgcgggaccaaggtggagatcaaaggtggtggcggctctggaggaggagggtccggacggtcgctggtggagtctgggggaggcttggtccagcctggggggtccctgagactctcctgtactgcctctggattcaccatcagtagctaccacatgcagtgggtccggcaggcacctgggaagtgcctggagtacatcggaaccattagtagtggtggtaatgtatactacgcaagctccgctagaggcagattcaccatctccagaccctcgtccaagaacacggtggatcttcaaatgaacagcctgagagccgaggacacggctgtgtattactgtgcgagagactctggttatagtgatcctatgtggggccagggaaccctggtcaccgtctcttcaggcggtggcggtagtgggggaggcggttctggcggcggagggtccggcggtggaggatcagacgttgtgatgacccagtctccatcttccgtgtctgcatctgtaggagacagagtcaccatcacctgtcaggccagtcagaacattaggacttacttatcctggtatcagcagaaaccagggaaagcccctaagctcctgatctatgctgcagccaatctggcatctggggtcccatcaaggttcagcggcagtggatctgggacagatttcactctcaccatcagcgacttggaacctggcgatgctgcaacttactattgtcagtctacctatcttggtactgattatgttggcggtgctttcggctgtgggaccaaggtggagatcaaatga

SEQ ID NO: 150 - protein, 1233 aa, Artificial Sequence
  Synthesized
DVVMTQSPSTLSASVGDRVTINCQASESISSWLAWYQQKPGKAPKLLIYEASKLASGVPSRFSGSGSGTEFTLTISSLQPDDFATYYCQGYFYFISRTYVNSFGCGTKVEIKGGGGSGGGGSGGGGSGGGGSEVQLVESGGGLVQPGGSLRLSCAASGFTISTNAMSWVRQAPGKCLEWIGVITGRDITYYASWAKGRFTISRDNSKNTLYLQMNSLRAEDTAVYYCARDGGSSAITSNNIWGQGTLVTVSTGGGGSGGGGSQVQLQQSGAEVKKPGSSVKVSCKASGYTFTNYYIYWVRQAPGQGLEWIGGINPTSGGSNFNEKFKTRVTITADESSTTAYMELSSLRSEDTAFYFCTRQGLWFDSDGRGFDFWGQGTTVTVSSASTKGPSVFPLAPSSKSTSGGTAALGCLVKDYFPEPVTVSWNSGALTSGVHTFPAVLQSSGLYSLSSVVTVPSSSLGTQTYICNVNHKPSNTKVDKRVEPKSCDKTHTCPPCPAPEAAGGPSVFLFPPKPKDTLMISRTPEVTCVVVDVSHEDPEVKFNWYVDGVEVHNAKTKPREEQYASTYRVVSVLTVLHQDWLNGKEYKCAVSNKALPAPIEKTISKAKGQPREPQVYTLPPSRDELTKNQVSLTCLVKGFYPSDIAVEWESNGQPENNYKTTPPVLDSDGSFFLYSKLTVDKSRWQQGNVFSCSVMHEALHNHYTQKSLSLSPGGGGGSGGGGSEVQLLESGGGLVQPGGSLRLSCAASGFSFSSGYDMCWVRQAPGKCLEWIACIAAGSAGITYDANWAKGRFTISRDNSKNTLYLQMNSLRAEDTAVYYCARSAFSFDYAMDLWGQGTLVTVSSGGGGSGGGGSGGGGSGGGGSDIQMTQSPSTLSASVGDRVTITCQASQSISSHLNWYQQKPGKAPKLLIYKASTLASGVPSRFSGSGSGTEFTLTISSLQPDDFATYYCQQGYSWGNVDNVFGCGTKVEIKGGGGSGGGGSGRSLVESGGGLVQPGGSLRLSCTASGFTISSYHMQWVRQAPGKCLEYIGTISSGGNVYYASSARGRFTISRPSSKNTVDLQMNSLRAEDTAVYYCARDSGYSDPMWGQGTLVTVSSGGGGSGGGGSGGGGSGGGGSDVVMTQSPSSVSASVGDRVTITCQASQNIRTYLSWYQQKPGKAPKLLIYAAANLASGVPSRFSGSGSGTDFTLTISDLEPGDAATYYCQSTYLGTDYVGGAFGCGTKVEIK

SEQ ID NO: 151 - DNA, 3696 bp, Artificial Sequence
  Synthesized
gacgtcgtgatgacccagtctccttccaccctgtctgcatctgtaggagacagagtcaccatcaattgccaagccagtgagagcattagcagttggttagcctggtatcagcagaaaccagggaaagcccctaagctcctgatctatgaagcatccaaactggcatctggggtcccatcaaggttcagcggcagtggatctgggacagaatttactctcaccatcagcagcctgcagcctgatgattttgcaacttattactgccaaggctatttttattttattagtcgtacttatgtaaattctttcggcggagggaccaaggtggagatcaaaggcggtggcggtagtgggggaggcggttctggcggcggagggtccggcggtggaggatcagaggtgcagctggtggagtctgggggaggcttggtccagcctggggggtccctgagactctcctgtgcagcctctggattcaccatcagtaccaatgcaatgagctgggtccgccaggctccagggaaggggctggagtggatcggagtcattactggtcgtgatatcacatactacgcgagctgggcgaaaggcagattcaccatctccagagacaattccaagaacacgctgtatcttcaaatgaacagcctgagagccgaggacacggctgtgtattactgtgcgagagacggtggttcttctgctattactagtaacaacatttggggccagggaaccctggtcaccgtgtcgacaggcggtggagggtccggcggtggtggatcagaggtgcaattggtccagtcaggagcagaggttaagaagcctggtgcttccgtcaaagtttcgtgtaaggccagcggctacaggttcacaaattattggattcattgggtcaggcaggctccgggacaaggcctggaatggatcggtggcattaatcccgggaataactacgctacatataggagaaaattccagggcagagttacgatgaccgcggacacctccacaagcactgtctacatggagctgtcatctctgagatccgaggacaccgcagtgtactattgtactagagaaggctacggtaattacggagcctggttcgcctactggggccagggtaccctagtcacagtctcctcagctagcaccaagggcccatcggtcttccccctggcaccctcctccaagagcacctctgggggcacagcggccctgggctgcctggtcaaggactacttccccgaaccggtgacggtgtcgtggaactcaggcgccctgaccagcggcgtgcacaccttcccggctgtcctacagtcctcaggactctactccctcagcagcgtggtgaccgtgccctccagcagcttgggcacccagacctacatctgcaacgtgaatcacaagcccagcaacaccaaggtggacaagagagttgagcccaaatcttgtgacaaaactcacacatgcccaccgtgcccagcacctgaagccgcgggggcaccgtcagtcttcctcttccccccaaaacccaaggacaccctcatgatctcccggacccctgaggtcacatgcgtggtggtggacgtgagccacgaagaccctgaggtcaagttcaactggtacgtggacggcgtggaggtgcataatgccaagacaaagccgcgggaggagcagtacaacagcacgtaccgtgtggtcagcgtcctcaccgtcctgcaccaggactggctgaatggcaaggagtacaagtgcgcggtctccaacaaagccctcccagcccccatcgagaaaaccatctccaaagccaaagggcagccccgagaaccacaggtgtacaccctgcccccatcccgggatgagctgaccaagaaccaggtcagcctgacctgcctggtcaaaggcttctatcccagcgacatcgccgtggagtgggagagcaatgggcagccggagaacaactacaagaccacgcctcccgtgctggactccgacggctccttcttcctctatagcaagctcaccgtggacaagagcaggtggcagcaggggaacgtcttctcatgctccgtgatgcatgaggctctgcacaaccactacacgcagaagagcctctccctgtctccgggtggcggtggagggtccggcggtggtggatccgaggtgcagctgttggagtctgggggaggcttggtacagcctggggggtccctgagactctcctgtgcagcctctggattctccttcagtagcgggtacgacatgtgctgggtccgccaggctccagggaaggggctggagtggatcgcatgcattgctgctggtagtgctggtatcacttacgacgcgaactgggcgaaaggccggttcaccatctccagagacaattccaagaacacgctgtatctgcaaatgaacagcctgagagccgaggacacggccgtatattactgtgcgagatcggcgttttcgttcgactacgccatggacctctggggccagggaaccctggtcaccgtctcgagcggtggaggcggatctggcggaggtggttccggcggtggcggctccggtggaggcggctctgacatccagatgacccagtctccttccaccctgtctgcatctgtaggagacagagtcaccatcacttgccaggccagtcagagcattagttcccacttaaactggtatcagcagaaaccagggaaagcccctaagctcctgatctataaggcatccactctggcatctggggtcccatcaaggttcagcggcagtggatctgggacagaatttactctcaccatcagcagcctgcagcctgatgattttgcaacttattactgccaacagggttatagttggggtaatgttgataatgttttcggcggagggaccaaggtggagatcaaaggcggtggagggtccggcggtggtggctccggacggtcgctggtggagtctgggggaggcttggtccagcctggggggtccctgagactctcctgtactgcctctggattcaccatcagtagctaccacatgcagtgggtccgccaggctccagggaaggggctggagtacatcggaaccattagtagtggtggtaatgtatactacgcaagctccgctagaggcagattcaccatctccagaccctcgtccaagaacacggtggatcttcaaatgaacagcctgagagccgaggacacggctgtgtattactgtgcgagagactctggttatagtgatcctatgtggggccagggaaccctggtcaccgtctcttcaggcggtggcggtagtgggggaggcggttctggcggcggagggtccggcggtggaggatcagacgttgtgatgacccagtctccatcttccgtgtctgcatctgtaggagacagagtcaccatcacctgtcaggccagtcagaacattaggacttacttatcctggtatcagcagaaaccagggaaagcccctaagctcctgatctatgctgcagccaatctggcatctggggtcccatcaaggttcagcggcagtggatctgggacagatttcactctcaccatcagcgacctggagcctggcgatgctgcaacttactattgtcagtctacctatcttggtactgattatgttggcggtgctttcggcggagggaccaaggtggagatcaaatga

SEQ ID NO: 152 - protein, 1231 aa, Artificial Sequence
  Synthesized
DVVMTQSPSTLSASVGDRVTINCQASESISSWLAWYQQKPGKAPKLLIYEASKLASGVPSRFSGSGSGTEFTLTISSLQPDDFATYYCQGYFYFISRTYVNSFGGGTKVEIKGGGGSGGGGSGGGGSGGGGSEVQLVESGGGLVQPGGSLRLSCAASGFTISTNAMSWVRQAPGKGLEWIGVITGRDITYYASWAKGRFTISRDNSKNTLYLQMNSLRAEDTAVYYCARDGGSSAITSNNIWGQGTLVTVSTGGGGSGGGGSEVQLVQSGAEVKKPGASVKVSCKASGYRFTNYWIHWVRQAPGQGLEWIGGINPGNNYATYRRKFQGRVTMTADTSTSTVYMELSSLRSEDTAVYYCTREGYGNYGAWFAYWGQGTLVTVSSASTKGPSVFPLAPSSKSTSGGTAALGCLVKDYFPEPVTVSWNSGALTSGVHTFPAVLQSSGLYSLSSVVTVPSSSLGTQTYICNVNHKPSNTKVDKRVEPKSCDKTHTCPPCPAPEAAGAPSVFLFPPKPKDTLMISRTPEVTCVVVDVSHEDPEVKFNWYVDGVEVHNAKTKPREEQYNSTYRVVSVLTVLHQDWLNGKEYKCAVSNKALPAPIEKTISKAKGQPREPQVYTLPPSRDELTKNQVSLTCLVKGFYPSDIAVEWESNGQPENNYKTTPPVLDSDGSFFLYSKLTVDKSRWQQGNVFSCSVMHEALHNHYTQKSLSLSPGGGGGSGGGGSEVQLLESGGGLVQPGGSLRLSCAASGFSFSSGYDMCWVRQAPGKGLEWIACIAAGSAGITYDANWAKGRFTISRDNSKNTLYLQMNSLRAEDTAVYYCARSAFSFDYAMDLWGQGTLVTVSSGGGGSGGGGSGGGGSGGGGSDIQMTQSPSTLSASVGDRVTITCQASQSISSHLNWYQQKPGKAPKLLIYKASTLASGVPSRFSGSGSGTEFTLTISSLQPDDFATYYCQQGYSWGNVDNVFGGGTKVEIKGGGGSGGGGSGRSLVESGGGLVQPGGSLRLSCTASGFTISSYHMQWVRQAPGKGLEYIGTISSGGNVYYASSARGRFTISRPSSKNTVDLQMNSLRAEDTAVYYCARDSGYSDPMWGQGTLVTVSSGGGGSGGGGSGGGGSGGGGSDVVMTQSPSSVSASVGDRVTITCQASQNIRTYLSWYQQKPGKAPKLLIYAAANLASGVPSRFSGSGSGTDFTLTISDLEPGDAATYYCQSTYLGTDYVGGAFGGGTKVEIK

SEQ ID NO: 153 - DNA, 660 bp, Artificial Sequence
  Synthesized
gacgttcaagtgacccagagcccatccagcctgagcgcatctgtaggagaccgggtcaccatcacttgtagatccagtcagagtcttgcaaacagttatgggaacacctttttgtcttggtatctgcacaaaccaggtaaagccccacaattgctcatctacggaatctctaacagatttagtggtgtaccagacaggttcagcggttccggaagtggtactgatttcaccctcacgatctcgtctctccagccagaagatttcgccacttattactgtttacaaggtacacatcagccgtacacattcggtcagggtactaaagtagaaatcaaacgtacggtggctgcaccatctgtcttcatcttcccgccatctgatgagcagttgaaatctggaactgcctctgttgtgtgcctgctgaataacttctatcccagagaggccaaagtacagtggaaggtggataacgccctccaatcgggtaactcccaggagagtgtcacagagcaggacagcaaggacagcacctacagcctcagcagcaccctgacgctgagcaaagcagactacgagaaacacaaagtctacgcctgcgaagtcacccatcagggcctgagctcgcccgtcacaaagagcttcaacaggggagagtgttag

SEQ ID NO: 154 - protein, 219 aa, Artificial Sequence
  Synthesized
DVQVTQSPSSLSASVGDRVTITCRSSQSLANSYGNTFLSWYLHKPGKAPQLLIYGISNRFSGVPDRFSGSGSGTDFTLTISSLQPEDFATYYCLQGTHQPYTFGQGTKVEIKRTVAAPSVFIFPPSDEQLKSGTASVVCLLNNFYPREAKVQWKVDNALQSGNSQESVTEQDSKDSTYSLSSTLTLSKADYEKHKVYACEVTHQGLSSPVTKSFNRGEC

SEQ ID NO: 155 - DNA, 3696 bp, Artificial Sequence
  Synthesized
gacgtcgtgatgacccagtctccttccaccctgtctgcatctgtaggagacagagtcaccatcaattgccaagccagtgagagcattagcagttggttagcctggtatcagcagaaaccagggaaagcccctaagctcctgatctatgaagcatccaaactggcatctggggtcccatcaaggttcagcggcagtggatctgggacagaatttactctcaccatcagcagcctgcagcctgatgattttgcaacttattactgccaaggctatttttattttattagtcgtacttatgtaaattctttcggctgtgggaccaaggtggagatcaaaggtggaggcggttcaggcggaggtggaagtggtggtggcggctctggaggcggcggatctgaggtgcagctggtggagtctgggggaggcttggtccagcctggggggtccctgagactctcctgtgcagcctctggattcaccatcagtaccaatgcaatgagctgggtccgccaggctccagggaagtgcctggagtggatcggagtcattactggtcgtgatatcacatactacgcgagctgggcgaaaggcagattcaccatctccagagacaattccaagaacacgctgtatcttcaaatgaacagcctgagagccgaggacacggctgtgtattactgtgcgagagacggtggttcttctgctattactagtaacaacatttggggccagggaaccctggtcaccgtgtcgacaggcggtggagggtccggcggtggtggatcagaggtgcaattggtccagtcaggagcagaggttaagaagcctggtgcttccgtcaaagtttcgtgtaaggccagcggctacaggttcacaaattattggattcattgggtcaggcaggctccgggacaaggcctggaatggatcggtggcattaatcccgggaataactacgctacatataggagaaaattccagggcagagttacgatgaccgcggacacctccacaagcactgtctacatggagctgtcatctctgagatccgaggacaccgcagtgtactattgtactagagaaggctacggtaattacggagcctggttcgcctactggggccagggtaccctagtcacagtctcctcagctagcaccaagggcccatcggtcttccccctggcaccctcctccaagagcacctctgggggcacagcggccctgggctgcctggtcaaggactacttccccgaaccggtgacggtgtcgtggaactcaggcgccctgaccagcggcgtgcacaccttcccggctgtcctacagtcctcaggactctactccctcagcagcgtggtgaccgtgccctccagcagcttgggcacccagacctacatctgcaacgtgaatcacaagcccagcaacaccaaggtggacaagagagttgagcccaaatcttgtgacaaaactcacacatgcccaccgtgcccagcacctgaagccgcggggggaccgtcagtcttcctcttccccccaaaacccaaggacaccctcatgatctcccggacccctgaggtcacatgcgtggtggtggacgtgagccacgaagaccctgaggtcaagttcaactggtacgtggacggcgtggaggtgcataatgccaagacaaagccgcgggaggagcagtacgccagcacgtaccgtgtggtcagcgtcctcaccgtcctgcaccaggactggctgaatggcaaggagtacaagtgcgcggtctccaacaaagccctcccagcccccatcgagaaaaccatctccaaagccaaagggcagccccgagaaccacaggtgtacaccctgcccccatcccgggatgagctgaccaagaaccaggtcagcctgacctgcctggtcaaaggcttctatcccagcgacatcgccgtggagtgggagagcaatgggcagccggagaacaactacaagaccacgcctcccgtgctggactccgacggctccttcttcctctatagcaagctcaccgtggacaagagcaggtggcagcaggggaacgtcttctcatgctccgtgatgcatgaggctctgcacaaccactacacgcagaagagcctctccctgtctccgggtggcggtggagggtccggcggtggtggatccgaggtgcagctgttggagtctgggggaggcttggtacagcctggggggtccctgagactctcctgtgcagcctctggattctccttcagtagcgggtacgacatgtgctgggtccgccaggctccagggaagtgcctggagtggatcgcatgcattgctgctggtagtgctggtatcacttacgacgcgaactgggcgaaaggccggttcaccatctccagagacaattccaagaacacgctgtatctgcaaatgaacagcctgagagccgaggacacggccgtatattactgtgcgagatcggcgttttcgttcgactacgccatggacctctggggccagggaaccctggtcaccgtctcgagcggtggaggcggttcaggcggaggtggaagtggtggtggcggctctggaggcggcggatctgacatccagatgacccagtctccttccaccctgtctgcatctgtaggagacagagtcaccatcacttgccaggccagtcagagcattagttcccacttaaactggtatcagcagaaaccagggaaagcccctaagctcctgatctataaggcatccactctggcatctggggtcccatcaaggttcagcggcagtggatctgggacagaatttactctcaccatcagcagcctgcagcctgatgattttgcaacttattactgccaacagggttatagttggggtaatgttgataatgttttcggctgcgggaccaaggtggagatcaaaggtggtggcggctctggaggaggagggtccggacggtcgctggtggagtctgggggaggcttggtccagcctggggggtccctgagactctcctgtactgcctctggattcaccatcagtagctaccacatgcagtgggtccggcaggcacctgggaagtgcctggagtacatcggaaccattagtagtggtggtaatgtatactacgcaagctccgctagaggcagattcaccatctccagaccctcgtccaagaacacggtggatcttcaaatgaacagcctgagagccgaggacacggctgtgtattactgtgcgagagactctggttatagtgatcctatgtggggccagggaaccctggtcaccgtctcttcaggcggtggcggtagtgggggaggcggttctggcggcggagggtccggcggtggaggatcagacgttgtgatgacccagtctccatcttccgtgtctgcatctgtaggagacagagtcaccatcacctgtcaggccagtcagaacattaggacttacttatcctggtatcagcagaaaccagggaaagcccctaagctcctgatctatgctgcagccaatctggcatctggggtcccatcaaggttcagcggcagtggatctgggacagatttcactctcaccatcagcgacttggaacctggcgatgctgcaacttactattgtcagtctacctatcttggtactgattatgttggcggtgctttcggctgtgggaccaaggtggagatcaaatga

SEQ ID NO: 156 - protein, 1231 aa, Artificial Sequence
  Synthesized
DVVMTQSPSTLSASVGDRVTINCQASESISSWLAWYQQKPGKAPKLLIYEASKLASGVPSRFSGSGSGTEFTLTISSLQPDDFATYYCQGYFYFISRTYVNSFGCGTKVEIKGGGGSGGGGSGGGGSGGGGSEVQLVESGGGLVQPGGSLRLSCAASGFTISTNAMSWVRQAPGKCLEWIGVITGRDITYYASWAKGRFTISRDNSKNTLYLQMNSLRAEDTAVYYCARDGGSSAITSNNIWGQGTLVTVSTGGGGSGGGGSEVQLVQSGAEVKKPGASVKVSCKASGYRFTNYWIHWVRQAPGQGLEWIGGINPGNNYATYRRKFQGRVTMTADTSTSTVYMELSSLRSEDTAVYYCTREGYGNYGAWFAYWGQGTLVTVSSASTKGPSVFPLAPSSKSTSGGTAALGCLVKDYFPEPVTVSWNSGALTSGVHTFPAVLQSSGLYSLSSVVTVPSSSLGTQTYICNVNHKPSNTKVDKRVEPKSCDKTHTCPPCPAPEAAGGPSVFLFPPKPKDTLMISRTPEVTCVVVDVSHEDPEVKFNWYVDGVEVHNAKTKPREEQYASTYRVVSVLTVLHQDWLNGKEYKCAVSNKALPAPIEKTISKAKGQPREPQVYTLPPSRDELTKNQVSLTCLVKGFYPSDIAVEWESNGQPENNYKTTPPVLDSDGSFFLYSKLTVDKSRWQQGNVFSCSVMHEALHNHYTQKSLSLSPGGGGGSGGGGSEVQLLESGGGLVQPGGSLRLSCAASGFSFSSGYDMCWVRQAPGKCLEWIACIAAGSAGITYDANWAKGRFTISRDNSKNTLYLQMNSLRAEDTAVYYCARSAFSFDYAMDLWGQGTLVTVSSGGGGSGGGGSGGGGSGGGGSDIQMTQSPSTLSASVGDRVTITCQASQSISSHLNWYQQKPGKAPKLLIYKASTLASGVPSRFSGSGSGTEFTLTISSLQPDDFATYYCQQGYSWGNVDNVFGCGTKVEIKGGGGSGGGGSGRSLVESGGGLVQPGGSLRLSCTASGFTISSYHMQWVRQAPGKCLEYIGTISSGGNVYYASSARGRFTISRPSSKNTVDLQMNSLRAEDTAVYYCARDSGYSDPMWGQGTLVTVSSGGGGSGGGGSGGGGSGGGGSDVVMTQSPSSVSASVGDRVTITCQASQNIRTYLSWYQQKPGKAPKLLIYAAANLASGVPSRFSGSGSGTDFTLTISDLEPGDAATYYCQSTYLGTDYVGGAFGCGTKVEIK

SEQ ID NO: 157 - DNA, 3684 bp, Artificial Sequence
  Synthesized
gacgtcgtgatgacccagtctccttccaccctgtctgcatctgtaggagacagagtcaccatcaattgccaagccagtgagagcattagcagttggttagcctggtatcagcagaaaccagggaaagcccctaagctcctgatctatgaagcatccaaactggcatctggggtcccatcaaggttcagcggcagtggatctgggacagaatttactctcaccatcagcagcctgcagcctgatgattttgcaacttattactgccaaggctatttttattttattagtcgtacttatgtaaattctttcggcggagggaccaaggtggagatcaaaggcggtggcggtagtgggggaggcggttctggcggcggagggtccggcggtggaggatcagaggtgcagctggtggagtctgggggaggcttggtccagcctggggggtccctgagactctcctgtgcagcctctggattcaccatcagtaccaatgcaatgagctgggtccgccaggctccagggaaggggctggagtggatcggagtcattactggtcgtgatatcacatactacgcgagctgggcgaaaggcagattcaccatctccagagacaattccaagaacacgctgtatcttcaaatgaacagcctgagagccgaggacacggctgtgtattactgtgcgagagacggtggttcttctgctattactagtaacaacatttggggccagggaaccctggtcaccgtgtcgacaggcggtggagggtccggcggtggtggatcacagatccagctgcagcagtctggacctgaggtggtgaagcctggggcttcagtgaagatatcctgcaaggcttctggctacaccttcactgactactatataacctgggtgaagcagaagcctggacagggacttgagtggattggatggatttatcctggaagcggtaatactaagtacaatgagaagttcaagggcaaggccacattgactgtagacacatcctccagcacagccttcatgcagctcagcagcctgacatctgaggacactgctgtctatttctgtgcgaactatggtaactactggtttgcttactggggccaagggactcaggtcactgtctctgcagctagcaccaagggcccatcggtcttccccctggcaccctcctccaagagcacctctgggggcacagcggccctgggctgcctggtcaaggactacttccccgaaccggtgacggtgtcgtggaactcaggcgccctgaccagcggcgtgcacaccttcccggctgtcctacagtcctcaggactctactccctcagcagcgtggtgaccgtgccctccagcagcttgggcacccagacctacatctgcaacgtgaatcacaagcccagcaacaccaaggtggacaagagagttgagcccaaatcttgtgacaaaactcacacatgcccaccgtgcccagcacctgaagccgcgggggcaccgtcagtcttcctcttccccccaaaacccaaggacaccctcatgatctcccggacccctgaggtcacatgcgtggtggtggacgtgagccacgaagaccctgaggtcaagttcaactggtacgtggacggcgtggaggtgcataatgccaagacaaagccgcgggaggagcagtacaacagcacgtaccgtgtggtcagcgtcctcaccgtcctgcaccaggactggctgaatggcaaggagtacaagtgcgcggtctccaacaaagccctcccagcccccatcgagaaaaccatctccaaagccaaagggcagccccgagaaccacaggtgtacaccctgcccccatcccgggatgagctgaccaagaaccaggtcagcctgacctgcctggtcaaaggcttctatcccagcgacatcgccgtggagtgggagagcaatgggcagccggagaacaactacaagaccacgcctcccgtgctggactccgacggctccttcttcctctatagcaagctcaccgtggacaagagcaggtggcagcaggggaacgtcttctcatgctccgtgatgcatgaggctctgcacaaccactacacgcagaagagcctctccctgtctccgggtggcggtggagggtccggcggtggtggatccgaggtgcagctgttggagtctgggggaggcttggtacagcctggggggtccctgagactctcctgtgcagcctctggattctccttcagtagcgggtacgacatgtgctgggtccgccaggctccagggaaggggctggagtggatcgcatgcattgctgctggtagtgctggtatcacttacgacgcgaactgggcgaaaggccggttcaccatctccagagacaattccaagaacacgctgtatctgcaaatgaacagcctgagagccgaggacacggccgtatattactgtgcgagatcggcgttttcgttcgactacgccatggacctctggggccagggaaccctggtcaccgtctcgagcggtggaggcggatctggcggaggtggttccggcggtggcggctccggtggaggcggctctgacatccagatgacccagtctccttccaccctgtctgcatctgtaggagacagagtcaccatcacttgccaggccagtcagagcattagttcccacttaaactggtatcagcagaaaccagggaaagcccctaagctcctgatctataaggcatccactctggcatctggggtcccatcaaggttcagcggcagtggatctgggacagaatttactctcaccatcagcagcctgcagcctgatgattttgcaacttattactgccaacagggttatagttggggtaatgttgataatgttttcggcggagggaccaaggtggagatcaaaggcggtggagggtccggcggtggtggctccggacggtcgctggtggagtctgggggaggcttggtccagcctggggggtccctgagactctcctgtactgcctctggattcaccatcagtagctaccacatgcagtgggtccgccaggctccagggaaggggctggagtacatcggaaccattagtagtggtggtaatgtatactacgcaagctccgctagaggcagattcaccatctccagaccctcgtccaagaacacggtggatcttcaaatgaacagcctgagagccgaggacacggctgtgtattactgtgcgagagactctggttatagtgatcctatgtggggccagggaaccctggtcaccgtctcttcaggcggtggcggtagtgggggaggcggttctggcggcggagggtccggcggtggaggatcagacgttgtgatgacccagtctccatcttccgtgtctgcatctgtaggagacagagtcaccatcacctgtcaggccagtcagaacattaggacttacttatcctggtatcagcagaaaccagggaaagcccctaagctcctgatctatgctgcagccaatctggcatctggggtcccatcaaggttcagcggcagtggatctgggacagatttcactctcaccatcagcgacctggagcctggcgatgctgcaacttactattgtcagtctacctatcttggtactgattatgttggcggtgctttcggcggagggaccaaggtggagatcaaatga

SEQ ID NO: 158 - DNA, 657 bp, Artificial Sequence
  Synthesized
gacattgtgctgacccaatctccagcttctttggctgtgtctctagggcagagggccaccatctcctgcaaggccagccaaagtgttgattttgatggtgatagttatatgaactggtaccaacagaaaccaggacagccacccaaagtcctcatctatgctgcatccaatctagaatctgggatcccagccaggtttagtggcagtgggtctgggacagacttcaccctcaacatccatcctgtggaggaggaggatgctgcaacctattactgtcagcaaagtaatgaggatccgtggacgttcggtggaggcaccaagctggaaatcaaacgtacggtggctgcaccatctgtcttcatcttcccgccatctgatgagcagttgaaatctggaactgcctctgttgtgtgcctgctgaataacttctatcccagagaggccaaagtacagtggaaggtggataacgccctccaatcgggtaactcccaggagagtgtcacagagcaggacagcaaggacagcacctacagcctcagcagcaccctgacgctgagcaaagcagactacgagaaacacaaagtctacgcctgcgaagtcacccatcagggcctgagctcgcccgtcacaaagagcttcaacaggggagagtgttag

SEQ ID NO: 159 - protein, 1227 aa, Artificial Sequence
  Synthesized
DVVMTQSPSTLSASVGDRVTINCQASESISSWLAWYQQKPGKAPKLLIYEASKLASGVPSRFSGSGSGTEFTLTISSLQPDDFATYYCQGYFYFISRTYVNSFGGGTKVEIKGGGGSGGGGSGGGGSGGGGSEVQLVESGGGLVQPGGSLRLSCAASGFTISTNAMSWVRQAPGKGLEWIGVITGRDITYYASWAKGRFTISRDNSKNTLYLQMNSLRAEDTAVYYCARDGGSSAITSNNIWGQGTLVTVSTGGGGSGGGGSQIQLQQSGPEVVKPGASVKISCKASGYTFTDYYITWVKQKPGQGLEWIGWIYPGSGNTKYNEKFKGKATLTVDTSSSTAFMQLSSLTSEDTAVYFCANYGNYWFAYWGQGTQVTVSAASTKGPSVFPLAPSSKSTSGGTAALGCLVKDYFPEPVTVSWNSGALTSGVHTFPAVLQSSGLYSLSSVVTVPSSSLGTQTYICNVNHKPSNTKVDKRVEPKSCDKTHTCPPCPAPEAAGAPSVFLFPPKPKDTLMISRTPEVTCVVVDVSHEDPEVKFNWYVDGVEVHNAKTKPREEQYNSTYRVVSVLTVLHQDWLNGKEYKCAVSNKALPAPIEKTISKAKGQPREPQVYTLPPSRDELTKNQVSLTCLVKGFYPSDIAVEWESNGQPENNYKTTPPVLDSDGSFFLYSKLTVDKSRWQQGNVFSCSVMHEALHNHYTQKSLSLSPGGGGGSGGGGSEVQLLESGGGLVQPGGSLRLSCAASGFSFSSGYDMCWVRQAPGKGLEWIACIAAGSAGITYDANWAKGRFTISRDNSKNTLYLQMNSLRAEDTAVYYCARSAFSFDYAMDLWGQGTLVTVSSGGGGSGGGGSGGGGSGGGGSDIQMTQSPSTLSASVGDRVTITCQASQSISSHLNWYQQKPGKAPKLLIYKASTLASGVPSRFSGSGSGTEFTLTISSLQPDDFATYYCQQGYSWGNVDNVFGGGTKVEIKGGGGSGGGGSGRSLVESGGGLVQPGGSLRLSCTASGFTISSYHMQWVRQAPGKGLEYIGTISSGGNVYYASSARGRFTISRPSSKNTVDLQMNSLRAEDTAVYYCARDSGYSDPMWGQGTLVTVSSGGGGSGGGGSGGGGSGGGGSDVVMTQSPSSVSASVGDRVTITCQASQNIRTYLSWYQQKPGKAPKLLIYAAANLASGVPSRFSGSGSGTDFTLTISDLEPGDAATYYCQSTYLGTDYVGGAFGGGTKVEIK

SEQ ID NO: 160 - protein, 218 aa, Artificial Sequence
  Synthesized
DIVLTQSPASLAVSLGQRATISCKASQSVDFDGDSYMNWYQQKPGQPPKVLIYAASNLESGIPARFSGSGSGTDFTLNIHPVEEEDAATYYCQQSNEDPWTFGGGTKLEIKRTVAAPSVFIFPPSDEQLKSGTASVVCLLNNFYPREAKVQWKVDNALQSGNSQESVTEQDSKDSTYSLSSTLTLSKADYEKHKVYACEVTHQGLSSPVTKSFNRGEC

SEQ ID NO: 161 - DNA, 3684 bp, Artificial Sequence
  Synthesized
gacgtcgtgatgacccagtctccttccaccctgtctgcatctgtaggagacagagtcaccatcaattgccaagccagtgagagcattagcagttggttagcctggtatcagcagaaaccagggaaagcccctaagctcctgatctatgaagcatccaaactggcatctggggtcccatcaaggttcagcggcagtggatctgggacagaatttactctcaccatcagcagcctgcagcctgatgattttgcaacttattactgccaaggctatttttattttattagtcgtacttatgtaaattctttcggctgtgggaccaaggtggagatcaaaggtggaggcggttcaggcggaggtggaagtggtggtggcggctctggaggcggcggatctgaggtgcagctggtggagtctgggggaggcttggtccagcctggggggtccctgagactctcctgtgcagcctctggattcaccatcagtaccaatgcaatgagctgggtccgccaggctccagggaagtgcctggagtggatcggagtcattactggtcgtgatatcacatactacgcgagctgggcgaaaggcagattcaccatctccagagacaattccaagaacacgctgtatcttcaaatgaacagcctgagagccgaggacacggctgtgtattactgtgcgagagacggtggttcttctgctattactagtaacaacatttggggccagggaaccctggtcaccgtgtcgacaggcggtggagggtccggcggtggtggatcacagatccagctgcagcagtctggacctgaggtggtgaagcctggggcttcagtgaagatatcctgcaaggcttctggctacaccttcactgactactatataacctgggtgaagcagaagcctggacagggacttgagtggattggatggatttatcctggaagcggtaatactaagtacaatgagaagttcaagggcaaggccacattgactgtagacacatcctccagcacagccttcatgcagctcagcagcctgacatctgaggacactgctgtctatttctgtgcgaactatggtaactactggtttgcttactggggccaagggactcaggtcactgtctctgcagctagcaccaagggcccatcggtcttccccctggcaccctcctccaagagcacctctgggggcacagcggccctgggctgcctggtcaaggactacttccccgaaccggtgacggtgtcgtggaactcaggcgccctgaccagcggcgtgcacaccttcccggctgtcctacagtcctcaggactctactccctcagcagcgtggtgaccgtgccctccagcagcttgggcacccagacctacatctgcaacgtgaatcacaagcccagcaacaccaaggtggacaagagagttgagcccaaatcttgtgacaaaactcacacatgcccaccgtgcccagcacctgaagccgcggggggaccgtcagtcttcctcttccccccaaaacccaaggacaccctcatgatctcccggacccctgaggtcacatgcgtggtggtggacgtgagccacgaagaccctgaggtcaagttcaactggtacgtggacggcgtggaggtgcataatgccaagacaaagccgcgggaggagcagtacgccagcacgtaccgtgtggtcagcgtcctcaccgtcctgcaccaggactggctgaatggcaaggagtacaagtgcgcggtctccaacaaagccctcccagcccccatcgagaaaaccatctccaaagccaaagggcagccccgagaaccacaggtgtacaccctgcccccatcccgggatgagctgaccaagaaccaggtcagcctgacctgcctggtcaaaggcttctatcccagcgacatcgccgtggagtgggagagcaatgggcagccggagaacaactacaagaccacgcctcccgtgctggactccgacggctccttcttcctctatagcaagctcaccgtggacaagagcaggtggcagcaggggaacgtcttctcatgctccgtgatgcatgaggctctgcacaaccactacacgcagaagagcctctccctgtctccgggtggcggtggagggtccggcggtggtggatccgaggtgcagctgttggagtctgggggaggcttggtacagcctggggggtccctgagactctcctgtgcagcctctggattctccttcagtagcgggtacgacatgtgctgggtccgccaggctccagggaagtgcctggagtggatcgcatgcattgctgctggtagtgctggtatcacttacgacgcgaactgggcgaaaggccggttcaccatctccagagacaattccaagaacacgctgtatctgcaaatgaacagcctgagagccgaggacacggccgtatattactgtgcgagatcggcgttttcgttcgactacgccatggacctctggggccagggaaccctggtcaccgtctcgagcggtggaggcggttcaggcggaggtggaagtggtggtggcggctctggaggcggcggatctgacatccagatgacccagtctccttccaccctgtctgcatctgtaggagacagagtcaccatcacttgccaggccagtcagagcattagttcccacttaaactggtatcagcagaaaccagggaaagcccctaagctcctgatctataaggcatccactctggcatctggggtcccatcaaggttcagcggcagtggatctgggacagaatttactctcaccatcagcagcctgcagcctgatgattttgcaacttattactgccaacagggttatagttggggtaatgttgataatgttttcggctgcgggaccaaggtggagatcaaaggtggtggcggctctggaggaggagggtccggacggtcgctggtggagtctgggggaggcttggtccagcctggggggtccctgagactctcctgtactgcctctggattcaccatcagtagctaccacatgcagtgggtccggcaggcacctgggaagtgcctggagtacatcggaaccattagtagtggtggtaatgtatactacgcaagctccgctagaggcagattcaccatctccagaccctcgtccaagaacacggtggatcttcaaatgaacagcctgagagccgaggacacggctgtgtattactgtgcgagagactctggttatagtgatcctatgtggggccagggaaccctggtcaccgtctcttcaggcggtggcggtagtgggggaggcggttctggcggcggagggtccggcggtggaggatcagacgttgtgatgacccagtctccatcttccgtgtctgcatctgtaggagacagagtcaccatcacctgtcaggccagtcagaacattaggacttacttatcctggtatcagcagaaaccagggaaagcccctaagctcctgatctatgctgcagccaatctggcatctggggtcccatcaaggttcagcggcagtggatctgggacagatttcactctcaccatcagcgacttggaacctggcgatgctgcaacttactattgtcagtctacctatcttggtactgattatgttggcggtgctttcggctgtgggaccaaggtggagatcaaatga

SEQ ID NO: 162 - protein, 1227 aa, Artificial Sequence
  Synthesized
DVVMTQSPSTLSASVGDRVTINCQASESISSWLAWYQQKPGKAPKLLIYEASKLASGVPSRFSGSGSGTEFTLTISSLQPDDFATYYCQGYFYFISRTYVNSFGCGTKVEIKGGGGSGGGGSGGGGSGGGGSEVQLVESGGGLVQPGGSLRLSCAASGFTISTNAMSWVRQAPGKCLEWIGVITGRDITYYASWAKGRFTISRDNSKNTLYLQMNSLRAEDTAVYYCARDGGSSAITSNNIWGQGTLVTVSTGGGGSGGGGSQIQLQQSGPEVVKPGASVKISCKASGYTFTDYYITWVKQKPGQGLEWIGWIYPGSGNTKYNEKFKGKATLTVDTSSSTAFMQLSSLTSEDTAVYFCANYGNYWFAYWGQGTQVTVSAASTKGPSVFPLAPSSKSTSGGTAALGCLVKDYFPEPVTVSWNSGALTSGVHTFPAVLQSSGLYSLSSVVTVPSSSLGTQTYICNVNHKPSNTKVDKRVEPKSCDKTHTCPPCPAPEAAGGPSVFLFPPKPKDTLMISRTPEVTCVVVDVSHEDPEVKFNWYVDGVEVHNAKTKPREEQYASTYRVVSVLTVLHQDWLNGKEYKCAVSNKALPAPIEKTISKAKGQPREPQVYTLPPSRDELTKNQVSLTCLVKGFYPSDIAVEWESNGQPENNYKTTPPVLDSDGSFFLYSKLTVDKSRWQQGNVFSCSVMHEALHNHYTQKSLSLSPGGGGGSGGGGSEVQLLESGGGLVQPGGSLRLSCAASGFSFSSGYDMCWVRQAPGKCLEWIACIAAGSAGITYDANWAKGRFTISRDNSKNTLYLQMNSLRAEDTAVYYCARSAFSFDYAMDLWGQGTLVTVSSGGGGSGGGGSGGGGSGGGGSDIQMTQSPSTLSASVGDRVTITCQASQSISSHLNWYQQKPGKAPKLLIYKASTLASGVPSRFSGSGSGTEFTLTISSLQPDDFATYYCQQGYSWGNVDNVFGCGTKVEIKGGGGSGGGGSGRSLVESGGGLVQPGGSLRLSCTASGFTISSYHMQWVRQAPGKCLEYIGTISSGGNVYYASSARGRFTISRPSSKNTVDLQMNSLRAEDTAVYYCARDSGYSDPMWGQGTLVTVSSGGGGSGGGGSGGGGSGGGGSDVVMTQSPSSVSASVGDRVTITCQASQNIRTYLSWYQQKPGKAPKLLIYAAANLASGVPSRFSGSGSGTDFTLTISDLEPGDAATYYCQSTYLGTDYVGGAFGCGTKVEIK

SEQ ID NO: 163 - DNA, 3675 bp, Artificial Sequence
  Synthesized
gacatccagatgacccagtctccatcctccctgtctgcatctgtaggagacagagtcaccatcacttgccaggcgagtcaggacatcagcaactatttaaattggtatcagcagaaaccagggaaagcccctaaactcctgatctacgatgcatccaatttggaaacaggggtcccatcaaggttcagtggaagtggatctgggacagattttactttcaccatcagcagcctgcagcctgaagatattgcaacatatttctgtcaacactttgatcatctcccgctcgctttcggcggtgggaccaaggtggaaattaaaggcggtggagggtccggcggtggtggatcacaggtgcagctgcaggagtcgggcccaggactggtgaagccttcggagaccctgtccctcacctgcactgtctctggtggctccgtcagcagtggtgattactactggacctggatccggcagtccccagggaagggactggagtggattggacacatctattacagtgggaacaccaattataacccctccctcaagagccgactcaccatatcaattgacacgtccaagactcagttctccctgaagctgagttctgtgaccgctgcggacacggccatttattactgtgtgcgagatcgagtgactggtgcttttgatatctggggccaagggacaatggtcaccgtctcgagcggtggaggcggatctggcggaggtggttccggcggtggcggctccggtggaggcggctctgaggtgcagctggtggagtctgggggaggcttggtccagcctggggggtccctgagactctcctgtgcagcctctggattcaccatcagtaccaatgcaatgagctgggtccgccaggctccagggaaggggctggagtggatcggagtcattactggtcgtgatatcacatactacgcgagctgggcgaaaggcagattcaccatctccagagacaattccaagaacacgctgtatcttcaaatgaacagcctgagagccgaggacacggctgtgtattactgtgcgagagacggtggttcttctgctattactagtaacaacatttggggccagggaaccctggtcaccgtgtcctcagctagcaccaagggcccatcggtcttccccctggcaccctcctccaagagcacctctgggggcacagcggccctgggctgcctggtcaaggactacttccccgaaccggtgacggtgtcgtggaactcaggcgccctgaccagcggcgtgcacaccttcccggctgtcctacagtcctcaggactctactccctcagcagcgtggtgaccgtgccctccagcagcttgggcacccagacctacatctgcaacgtgaatcacaagcccagcaacaccaaggtggacaagagagttgagcccaaatcttgtgacaaaactcacacatgcccaccgtgcccagcacctgaagccgcggggggaccgtcagtcttcctcttccccccaaaacccaaggacaccctcatgatctcccggacccctgaggtcacatgcgtggtggtggacgtgagccacgaagaccctgaggtcaagttcaactggtacgtggacggcgtggaggtgcataatgccaagacaaagccgcgggaggagcagtacaacagcacgtaccgtgtggtcagcgtcctcaccgtcctgcaccaggactggctgaatggcaaggagtacaagtgcgcggtctccaacaaagccctcccagcccccatcgagaaaaccatctccaaagccaaagggcagccccgagaaccacaggtgtacaccctgcccccatcccgggatgagctgaccaagaaccaggtcagcctgacctgcctggtcaaaggcttctatcccagcgacatcgccgtggagtgggagagcaatgggcagccggagaacaactacaagaccacgcctcccgtgctggactccgacggctccttcttcctctatagcaagctcaccgtggacaagagcaggtggcagcaggggaacgtcttctcatgctccgtgatgcatgaggctctgcacaaccactacacgcagaagagcctctccctgtctccgggtggcggtggagggtccggcggtggtggatccgaggtgcagctgttggagtctgggggaggcttggtacagcctggggggtccctgagactctcctgtgcagcctctggattctccttcagtagcgggtacgacatgtgctgggtccgccaggctccagggaaggggctggagtggatcgcatgcattgctgctggtagtgctggtatcacttacgacgcgaactgggcgaaaggccggttcaccatctccagagacaattccaagaacacgctgtatctgcaaatgaacagcctgagagccgaggacacggccgtatattactgtgcgagatcggcgttttcgttcgactacgccatggacctctggggccagggaaccctggtcaccgtctcgagcggtggaggcggatctggcggaggtggttccggcggtggcggctccggtggaggcggctctgacatccagatgacccagtctccttccaccctgtctgcatctgtaggagacagagtcaccatcacttgccaggccagtcagagcattagttcccacttaaactggtatcagcagaaaccagggaaagcccctaagctcctgatctataaggcatccactctggcatctggggtcccatcaaggttcagcggcagtggatctgggacagaatttactctcaccatcagcagcctgcagcctgatgattttgcaacttattactgccaacagggttatagttggggtaatgttgataatgttttcggcggagggaccaaggtggagatcaaaggcggtggagggtccggcggtggtggctccggacggtcgctggtggagtctgggggaggcttggtccagcctggggggtccctgagactctcctgtactgcctctggattcaccatcagtagctaccacatgcagtgggtccgccaggctccagggaaggggctggagtacatcggaaccattagtagtggtggtaatgtatactacgcaagctccgctagaggcagattcaccatctccagaccctcgtccaagaacacggtggatcttcaaatgaacagcctgagagccgaggacacggctgtgtattactgtgcgagagactctggttatagtgatcctatgtggggccagggaaccctggtcaccgtctcttcaggcggtggcggtagtgggggaggcggttctggcggcggagggtccggcggtggaggatcagacgttgtgatgacccagtctccatcttccgtgtctgcatctgtaggagacagagtcaccatcacctgtcaggccagtcagaacattaggacttacttatcctggtatcagcagaaaccagggaaagcccctaagctcctgatctatgctgcagccaatctggcatctggggtcccatcaaggttcagcggcagtggatctgggacagatttcactctcaccatcagcgacctggagcctggcgatgctgcaacttactattgtcagtctacctatcttggtactgattatgttggcggtgctttcggcggagggaccaaggtggagatcaaatga

SEQ ID NO: 164 - protein, 1224 aa, Artificial Sequence
  Synthesized
DIQMTQSPSSLSASVGDRVTITCQASQDISNYLNWYQQKPGKAPKLLIYDASNLETGVPSRFSGSGSGTDFTFTISSLQPEDIATYFCQHFDHLPLAFGGGTKVEIKGGGGSGGGGSQVQLQESGPGLVKPSETLSLTCTVSGGSVSSGDYYWTWIRQSPGKGLEWIGHIYYSGNTNYNPSLKSRLTISIDTSKTQFSLKLSSVTAADTAIYYCVRDRVTGAFDIWGQGTMVTVSSGGGGSGGGGSGGGGSGGGGSEVQLVESGGGLVQPGGSLRLSCAASGFTISTNAMSWVRQAPGKGLEWIGVITGRDITYYASWAKGRFTISRDNSKNTLYLQMNSLRAEDTAVYYCARDGGSSAITSNNIWGQGTLVTVSSASTKGPSVFPLAPSSKSTSGGTAALGCLVKDYFPEPVTVSWNSGALTSGVHTFPAVLQSSGLYSLSSVVTVPSSSLGTQTYICNVNHKPSNTKVDKRVEPKSCDKTHTCPPCPAPEAAGGPSVFLFPPKPKDTLMISRTPEVTCVVVDVSHEDPEVKFNWYVDGVEVHNAKTKPREEQYNSTYRVVSVLTVLHQDWLNGKEYKCAVSNKALPAPIEKTISKAKGQPREPQVYTLPPSRDELTKNQVSLTCLVKGFYPSDIAVEWESNGQPENNYKTTPPVLDSDGSFFLYSKLTVDKSRWQQGNVFSCSVMHEALHNHYTQKSLSLSPGGGGGSGGGGSEVQLLESGGGLVQPGGSLRLSCAASGFSFSSGYDMCWVRQAPGKGLEWIACIAAGSAGITYDANWAKGRFTISRDNSKNTLYLQMNSLRAEDTAVYYCARSAFSFDYAMDLWGQGTLVTVSSGGGGSGGGGSGGGGSGGGGSDIQMTQSPSTLSASVGDRVTITCQASQSISSHLNWYQQKPGKAPKLLIYKASTLASGVPSRFSGSGSGTEFTLTISSLQPDDFATYYCQQGYSWGNVDNVFGGGTKVEIKGGGGSGGGGSGRSLVESGGGLVQPGGSLRLSCTASGFTISSYHMQWVRQAPGKGLEYIGTISSGGNVYYASSARGRFTISRPSSKNTVDLQMNSLRAEDTAVYYCARDSGYSDPMWGQGTLVTVSSGGGGSGGGGSGGGGSGGGGSDVVMTQSPSSVSASVGDRVTITCQASQNIRTYLSWYQQKPGKAPKLLIYAAANLASGVPSRFSGSGSGTDFTLTISDLEPGDAATYYCQSTYLGTDYVGGAFGGGTKVEIK

SEQ ID NO: 165 - DNA, 2205 bp, Artificial Sequence
  Synthesized
cagtctgccctgactcagcctgcctccgtgtctgggtctcctggacagtcgatcaccatctcctgcactggaaccagcagtgacgttggtggttataactttgtctcctggtaccaacaacacccaggcaaagcccccaaactcatgatctatgatgtcagtgatcggccctcaggggtgtctgatcgcttctccggctccaagtctggcaacacggcctccctgatcatctctggcctccaggctgacgacgaggctgattattactgcagctcatatgggagcagcagcactcatgtgattttcggcggagggaccaaggtgaccgtcctaggtggaggcggttcaggcggaggtggttccggcggtggcggctccggtggaggcggctctcaggtgcaattgcaggagtcggggggaggcctggtcaagcctggagggtccctgagactctcctgtgcagcctctggattcacctttagtagttattggatgagctgggtccgccaggctccagggaaggggctggagtgggtggccaacataaaccgcgatggaagtgcgagttactatgtggactctgtgaagggccgattcaccatctccagagacgacgccaagaactcactgtatctgcaaatgaacagcctgagagctgaggacacggctgtgtattactgtgcgagagatcgtggggtgggctacttcgatctctggggccgtggcaccctggtcaccgtctcgagcggcggtggagggtccggcggtggtggatccgacgtcgtgatgacccagtctccttccaccctgtctgcatctgtaggagacagagtcaccatcaattgccaagccagtgagagcattagcagttggttagcctggtatcagcagaaaccagggaaagcccctaagctcctgatctatgaagcatccaaactggcatctggggtcccatcaaggttcagcggcagtggatctgggacagaatttactctcaccatcagcagcctgcagcctgatgattttgcaacttattactgccaaggctatttttattttattagtcgtacttatgtaaattctttcggcggagggaccaaggtggagatcaaacgtacggtggctgcaccatctgtcttcatcttcccgccatctgatgagcagttgaaatctggaactgcctctgttgtgtgcctgctgaataacttctatcccagagaggccaaagtacagtggaaggtggataacgccctccaatcgggtaactcccaggagagtgtcacagagcaggacagcaaggacagcacctacagcctcagcagcaccctgacgctgagcaaagcagactacgagaaacacaaagtctacgcctgcgaagtcacccatcagggcctgagctcgcccgtcacaaagagcttcaacaggggagagtgtggcggtggagggtccggcggtggtggatcccaggtcacattgaaggaatctggccccggccttgttcagccaggacagacccttaggctcacctgtgccttcagtggtttttctcttagcactagcggtatgggggtcggctggattcggcagcctcccggcaaaggtcttgagtggttggctcacatttggtgggacgacgacaaacggtataatcctgccttgaaaagtcggctgaccattagtaaggatacctcaaaaaatcaagtgtacttgcaaatgaatagccttgacgccgaggatacggctgtatattattgcgcgcggatggaactctggtcttactactttgattattgggggcaggggactctcgtcacggtctcgagtggcggtggcggtagtgggggaggcggttctggcggcggagggtccggcggtggaggatcagaaaatgtattgacacagagccccgcctccctcagtgcctcacctggggaaagggtaactatcacttgctctgcatcaagcagcgtctcatacatgcattggtatcaacaaaagcctggacaggcccccaagctctggatatacgatacgagcaagctggcttccggcgtacctagccgcttcagtggttccggctcaggcaacgatcacacccttacgatttccagtatggaacccgaagattttgcaacttattattgtttccaggggagcgtgtacccattcactttcgggcaggggacaaaattggagataaagtag

SEQ ID NO: 166 - protein, 734 aa, Artificial Sequence
  Synthesized
QSALTQPASVSGSPGQSITISCTGTSSDVGGYNFVSWYQQHPGKAPKLMIYDVSDRPSGVSDRFSGSKSGNTASLIISGLQADDEADYYCSSYGSSSTHVIFGGGTKVTVLGGGGSGGGGSGGGGSGGGGSQVQLQESGGGLVKPGGSLRLSCAASGFTFSSYWMSWVRQAPGKGLEWVANINRDGSASYYVDSVKGRFTISRDDAKNSLYLQMNSLRAEDTAVYYCARDRGVGYFDLWGRGTLVTVSSGGGGSGGGGSDVVMTQSPSTLSASVGDRVTINCQASESISSWLAWYQQKPGKAPKLLIYEASKLASGVPSRFSGSGSGTEFTLTISSLQPDDFATYYCQGYFYFISRTYVNSFGGGTKVEIKRTVAAPSVFIFPPSDEQLKSGTASVVCLLNNFYPREAKVQWKVDNALQSGNSQESVTEQDSKDSTYSLSSTLTLSKADYEKHKVYACEVTHQGLSSPVTKSFNRGECGGGGSGGGGSQVTLKESGPGLVQPGQTLRLTCAFSGFSLSTSGMGVGWIRQPPGKGLEWLAHIWWDDDKRYNPALKSRLTISKDTSKNQVYLQMNSLDAEDTAVYYCARMELWSYYFDYWGQGTLVTVSSGGGGSGGGGSGGGGSGGGGSENVLTQSPASLSASPGERVTITCSASSSVSYMHWYQQKPGQAPKLWIYDTSKLASGVPSRFSGSGSGNDHTLTISSMEPEDFATYYCFQGSVYPFTFGQGTKLEIK

SEQ ID NO: 167 - DNA, 2184 bp, Artificial Sequence
  Synthesized
gagatcgtgatgacacaatctccatctacgctctccgcctcagtgggcgatagagtaattattacttgtcaagcctcagagagcatttcatcatggctcgcctggtatcagcaaaagcctgggaaggcccccaaacttctcatctatgaagcatcaaagctggcctctggggttccgtctcgcttctccgggtccggcagtggtgcagagtttacgttgactatatcttctttgcaacctgacgatttcgcaacatattattgccagggatacttttattttatttcccgaacatatgttaactcttttgggtgcgggaccaaactcactgtgctggggtctaccggtagtggttctaagcctggttcaggcgaaggcagtacgaaaggggaagtgcaactggtcgaaagcggtggagggcttgttcaacctggaggaagcctccgcttgtcctgcacggctagcggctttacaataagtacgaacgccatgagctgggtccggcaggctccaggtaagtgtctcgaatgggtgggggtcataacaggcagggacattacctactacgccagttgggccaagggtcgatttaccatttctagagatacatccaagaacacggtgtacctccagatgaattctcttagggcggaagacacagcagtatactactgcgcgcgagatggcgggagcagtgcgatcacatccaacaacatctggggtcagggcactcttgtcacggtgtcgactggtggtgggggtagtggcggcggaggtagctttcttaattcccttttcaaccaagaggttcagatccccttgactgaaagctattgcggcccttgtccgaaaaactggatatgttacaagaataattgttaccaattcttcgacgaaagcaagaactggtatgagagtcaggcgtcttgtatgagtcagaatgccagcctgcttaaggtttattcaaaagaagaccaggatctgcttaagttggtaaagagctaccactggatggggctggtacatatcccaacgaatgggtcatggcagtgggaggacggttctattctgagtccaaatctcctgacgatcatcgaaatgcagaaaggggactgtgccctgtatgcatcatccttcaaggggtacatcgagaactgcagtaccccaaatacctacatttgtatgcaaagaacggttgctagcaccaagggcccatcggtcttccccctggcaccctcctccaagagcacctctgggggcacagcggccctgggctgcctggtcaaggactacttccccgaaccggtgacggtgtcgtggaactcaggcgccctgaccagcggcgtgcacaccttcccggctgtcctacagtcctcaggactctactccctcagcagcgtggtgaccgtgccctccagcagcttgggcacccagacctacatctgcaacgtgaatcacaagcccagcaacaccaaggtggacaagagagttgagcccaaatcttgtgacaaaactcacacatgcccaccgtgcccagcacctgaagccgcggggggaccgtcagtcttcctcttccccccaaaacccaaggacaccctcatgatctcccggacccctgaggtcacatgcgtggtggtggacgtgagccacgaagaccctgaggtcaagttcaactggtacgtggacggcgtggaggtgcataatgccaagacaaagccgcgggaggagcagtacgccagcacgtaccgtgtggtcagcgtcctcaccgtcctgcaccaggactggctgaatggcaaggagtacaagtgcgcggtctccaacaaagccctcccagcccccatcgagaaaaccatctccaaagccaaagggcagccccgagaaccacaggtgtacaccctgcccccatcccgggatgagctgaccaagaaccaggtcagcctgacctgcctggtcaaaggcttctatcccagcgacatcgccgtggagtgggagagcaatgggcagccggagaacaactacaagaccacgcctcccgtgctggactccgacggctccttcttcctctatagcaagctcaccgtggacaagagcaggtggcagcaggggaacgtcttctcatgctccgtgatgcatgaggctctgcacaaccactacacgcagaagagcctctccctgtctccgggt

SEQ ID NO: 168 - protein, 728 aa, Artificial Sequence
  Synthesized
EIVMTQSPSTLSASVGDRVIITCQASESISSWLAWYQQKPGKAPKLLIYEASKLASGVPSRFSGSGSGAEFTLTISSLQPDDFATYYCQGYFYFISRTYVNSFGCGTKLTVLGSTGSGSKPGSGEGSTKGEVQLVESGGGLVQPGGSLRLSCTASGFTISTNAMSWVRQAPGKCLEWVGVITGRDITYYASWAKGRFTISRDTSKNTVYLQMNSLRAEDTAVYYCARDGGSSAITSNNIWGQGTLVTVSTGGGGSGGGGSFLNSLFNQEVQIPLTESYCGPCPKNWICYKNNCYQFFDESKNWYESQASCMSQNASLLKVYSKEDQDLLKLVKSYHWMGLVHIPTNGSWQWEDGSILSPNLLTIIEMQKGDCALYASSFKGYIENCSTPNTYICMQRTVASTKGPSVFPLAPSSKSTSGGTAALGCLVKDYFPEPVTVSWNSGALTSGVHTFPAVLQSSGLYSLSSVVTVPSSSLGTQTYICNVNHKPSNTKVDKRVEPKSCDKTHTCPPCPAPEAAGGPSVFLFPPKPKDTLMISRTPEVTCVVVDVSHEDPEVKFNWYVDGVEVHNAKTKPREEQYASTYRVVSVLTVLHQDWLNGKEYKCAVSNKALPAPIEKTISKAKGQPREPQVYTLPPSRDELTKNQVSLTCLVKGFYPSDIAVEWESNGQPENNYKTTPPVLDSDGSFFLYSKLTVDKSRWQQGNVFSCSVMHEALHNHYTQKSLSLSPG

SEQ ID NO: 169 - DNA, 738 bp, Artificial Sequence
  Synthesized
ttcctaaactcattattcaaccaagaagttcaaattcccttgaccgaaagttactgtggcccatgtcctaaaaactggatatgttacaaaaataactgctaccaattttttgatgagagtaaaaactggtatgagagccaggcttcttgtatgtctcaaaatgccagccttctgaaagtatacagcaaagaggaccaggatttacttaaactggtgaagtcatatcattggatgggactagtacacattccaacaaatggatcttggcagtgggaagatggctccattctctcacccaacctactaacaataattgaaatgcagaagggagactgtgcactctatgcctcgagctttaaaggctatatagaaaactgttcaactccaaatacgtacatctgcatgcaaaggactgtgcgtacggtggctgcaccatctgtcttcatcttcccgccatctgatgagcagttgaaatctggaactgcctctgttgtgtgcctgctgaataacttctatcccagagaggccaaagtacagtggaaggtggataacgccctccaatcgggtaactcccaggagagtgtcacagagcaggacagcaaggacagcacctacagcctcagcagcaccctgacgctgagcaaagcagactacgagaaacacaaagtctacgcctgcgaagtcacccatcagggcctgagctcgcccgtcacaaagagcttcaacaggggagagtgt

SEQ ID NO: 170 - protein, 246 aa, Artificial Sequence
  Synthesized
FLNSLFNQEVQIPLTESYCGPCPKNWICYKNNCYQFFDESKNWYESQASCMSQNASLLKVYSKEDQDLLKLVKSYHWMGLVHIPTNGSWQWEDGSILSPNLLTIIEMQKGDCALYASSFKGYIENCSTPNTYICMQRTVRTVAAPSVFIFPPSDEQLKSGTASVVCLLNNFYPREAKVQWKVDNALQSGNSQESVTEQDSKDSTYSLSSTLTLSKADYEKHKVYACEVTHQGLSSPVTKSFNRGEC

SEQ ID NO: 171 - DNA, 2184 bp, Artificial Sequence; identical to SEQ ID NO: 167
  Synthesized

SEQ ID NO: 172 - protein, 728 aa, Artificial Sequence; identical to SEQ ID NO: 168
  Synthesized

SEQ ID NO: 173 - DNA, 1515 bp, Artificial Sequence; identical to SEQ ID NO: 83
  Synthesized

SEQ ID NO: 174 - protein, 505 aa, Artificial Sequence; identical to SEQ ID NO: 80
  Synthesized

SEQ ID NO: 175 - DNA, 3741 bp, Artificial Sequence; identical to SEQ ID NO: 77
  Synthesized

SEQ ID NO: 176 - protein, 1247 aa, Artificial Sequence; identical to SEQ ID NO: 78
  Synthesized

SEQ ID NO: 177 - DNA, 738 bp, Artificial Sequence; identical to SEQ ID NO: 169
  Synthesized

SEQ ID NO: 178 - protein, 246 aa, Artificial Sequence; identical to SEQ ID NO: 170
  Synthesized

SEQ ID NO: 179 - DNA, 1407 bp, Artificial Sequence
  Synthesized
tttcttaattcccttttcaaccaagaggttcagatccccttgactgaaagctattgcggcccttgtccgaaaaactggatatgttacaagaataattgttaccaattcttcgacgaaagcaagaactggtatgagagtcaggcgtcttgtatgagtcagaatgccagcctgcttaaggtttattcaaaagaagaccaggatctgcttaagttggtaaagagctaccactggatggggctggtacatatcccaacgaatgggtcatggcagtgggaggacggttctattctgagtccaaatctcctgacgatcatcgaaatgcagaaaggggactgtgccctgtatgcatcatccttcaaggggtacatcgagaactgcagtaccccaaatacctacatttgtatgcaaagaacggttgctagcaccaagggcccatcggtcttccccctggcaccctcctccaagagcacctctgggggcacagcggccctgggctgcctggtcaaggactacttccccgaaccggtgacggtgtcgtggaactcaggcgccctgaccagcggcgtgcacaccttcccggctgtcctacagtcctcaggactctactccctcagcagcgtggtgaccgtgccctccagcagcttgggcacccagacctacatctgcaacgtgaatcacaagcccagcaacaccaaggtggacaagagagttgagcccaaatcttgtgacaaaactcacacatgcccaccgtgcccagcacctgaagccgcggggggaccgtcagtcttcctcttccccccaaaacccaaggacaccctcatgatctcccggacccctgaggtcacatgcgtggtggtggacgtgagccacgaagaccctgaggtcaagttcaactggtacgtggacggcgtggaggtgcataatgccaagacaaagccgcgggaggagcagtacgccagcacgtaccgtgtggtcagcgtcctcaccgtcctgcaccaggactggctgaatggcaaggagtacaagtgcgcggtctccaacaaagccctcccagcccccatcgagaaaaccatctccaaagccaaagggcagccccgagaaccacaggtgtacaccctgcccccatcccgggatgagctgaccaagaaccaggtcagcctgacctgcctggtcaaaggcttctatcccagcgacatcgccgtggagtgggagagcaatgggcagccggagaacaactacaagaccacgcctcccgtgctggactccgacggctccttcttcctctatagcaagctcaccgtggacaagagcaggtggcagcaggggaacgtcttctcatgctccgtgatgcatgaggctctgcacaaccactacacgcagaagagcctctccctgtctccgggtaaa

SEQ ID NO: 180 - protein, 469 aa, Artificial Sequence
  Synthesized
FLNSLFNQEVQIPLTESYCGPCPKNWICYKNNCYQFFDESKNWYESQASCMSQNASLLKVYSKEDQDLLKLVKSYHWMGLVHIPTNGSWQWEDGSILSPNLLTIIEMQKGDCALYASSFKGYIENCSTPNTYICMQRTVASTKGPSVFPLAPSSKSTSGGTAALGCLVKDYFPEPVTVSWNSGALTSGVHTFPAVLQSSGLYSLSSVVTVPSSSLGTQTYICNVNHKPSNTKVDKRVEPKSCDKTHTCPPCPAPEAAGGPSVFLFPPKPKDTLMISRTPEVTCVVVDVSHEDPEVKFNWYVDGVEVHNAKTKPREEQYASTYRVVSVLTVLHQDWLNGKEYKCAVSNKALPAPIEKTISKAKGQPREPQVYTLPPSRDELTKNQVSLTCLVKGFYPSDIAVEWESNGQPENNYKTTPPVLDSDGSFFLYSKLTVDKSRWQQGNVFSCSVMHEALHNHYTQKSLSLSPGK

SEQ ID NO: 181 - DNA, 738 bp, Artificial Sequence; identical to SEQ ID NO: 169
  Synthesized

SEQ ID NO: 182 - protein, 246 aa, Artificial Sequence; identical to SEQ ID NO: 170
  Synthesized

SEQ ID NO: 183 - DNA, 1407 bp, Artificial Sequence
  Synthesized
tttcttaattcccttttcaaccaagaggttcagatccccttgactgaaagctattgcggcccttgtccgaaaaactggatatgttacaagaataattgttaccaattcttcgacgaaagcaagaactggtatgagagtcaggcgtcttgtatgagtcagaatgccagcctgcttaaggtttattcaaaagaagaccaggatctgcttaagttggtaaagagctaccactggatggggctggtacatatcccaacgaatgggtcatggcagtgggaggacggttctattctgagtccaaatctcctgacgatcatcgaaatgcagaaaggggactgtgccctgtatgcatcatccttcaaggggtacatcgagaactgcagtaccccaaatacctacatttgtatgcaaagaacggttgctagcaccaagggcccatcggtcttccccctggcaccctcctccaagagcacctctgggggcacagcggccctgggctgcctggtcaaggactacttccccgaaccggtgacggtgtcgtggaactcaggcgccctgaccagcggcgtgcacaccttcccggctgtcctacagtcctcaggactctactccctcagcagcgtggtgaccgtgccctccagcagcttgggcacccagacctacatctgcaacgtgaatcacaagcccagcaacaccaaggtggacaagagagttgagcccaaatcttgtgacaaaactcacacatgcccaccgtgcccagcacctgaagccgcggggggaccgtcagtcttcctcttccccccaaaacccaaggacaccctcatgatctcccggacccctgaggtcacatgcgtggtggtggacgtgagccacgaagaccctgaggtcaagttcaactggtacgtggacggcgtggaggtgcataatgccaagacaaagccgcgggaggagcagtacgccagcacgtaccgtgtggtcagcgtcctcaccgtcctgcaccaggactggctgaatggcaaggagtacaagtgcgcggtctccaacaaagccctcccagcccccatcgagaaaaccatctccaaagccaaagggcagccccgagaaccacaggtgtacaccctgcccccatgtcgggatgagctgaccaagaaccaggtcagcctgtggtgcctggtcaaaggcttctatcccagcgacatcgccgtggagtgggagagcaatgggcagccggagaacaactacaagaccacgcctcccgtgctggactccgacggctccttcttcctctatagcaagctcaccgtggacaagagcaggtggcagcaggggaacgtcttctcatgctccgtgatgcatgaggctctgcacaaccactacacgcagaagagcctctccctgtctccgggtaaa

SEQ ID NO: 184 - protein, 469 aa, Artificial Sequence
  Synthesized
FLNSLFNQEVQIPLTESYCGPCPKNWICYKNNCYQFFDESKNWYESQASCMSQNASLLKVYSKEDQDLLKLVKSYHWMGLVHIPTNGSWQWEDGSILSPNLLTIIEMQKGDCALYASSFKGYIENCSTPNTYICMQRTVASTKGPSVFPLAPSSKSTSGGTAALGCLVKDYFPEPVTVSWNSGALTSGVHTFPAVLQSSGLYSLSSVVTVPSSSLGTQTYICNVNHKPSNTKVDKRVEPKSCDKTHTCPPCPAPEAAGGPSVFLFPPKPKDTLMISRTPEVTCVVVDVSHEDPEVKFNWYVDGVEVHNAKTKPREEQYASTYRVVSVLTVLHQDWLNGKEYKCAVSNKALPAPIEKTISKAKGQPREPQVYTLPPCRDELTKNQVSLWCLVKGFYPSDIAVEWESNGQPENNYKTTPPVLDSDGSFFLYSKLTVDKSRWQQGNVFSCSVMHEALHNHYTQKSLSLSPGK

SEQ ID NO: 185 - DNA, 738 bp, Artificial Sequence; identical to SEQ ID NO: 169
  Synthesized

SEQ ID NO: 186 - protein, 246 aa, Artificial Sequence; identical to SEQ ID NO: 170
  Synthesized

SEQ ID NO: 187 - DNA, 1407 bp, Artificial Sequence
  Synthesized
tttcttaattcccttttcaaccaagaggttcagatccccttgactgaaagctattgcggcccttgtccgaaaaactggatatgttacaagaataattgttaccaattcttcgacgaaagcaagaactggtatgagagtcaggcgtcttgtatgagtcagaatgccagcctgcttaaggtttattcaaaagaagaccaggatctgcttaagttggtaaagagctaccactggatggggctggtacatatcccaacgaatgggtcatggcagtgggaggacggttctattctgagtccaaatctcctgacgatcatcgaaatgcagaaaggggactgtgccctgtatgcatcatccttcaaggggtacatcgagaactgcagtaccccaaatacctacatttgtatgcaaagaacggttgctagcaccaagggcccatcggtcttccccctggcaccctcctccaagagcacctctgggggcacagcggccctgggctgcctggtcaaggactacttccccgaaccggtgacggtgtcgtggaactcaggcgccctgaccagcggcgtgcacaccttcccggctgtcctacagtcctcaggactctactccctcagcagcgtggtgaccgtgccctccagcagcttgggcacccagacctacatctgcaacgtgaatcacaagcccagcaacaccaaggtggacaagagagttgagcccaaatcttgtgacaaaactcacacatgcccaccgtgcccagcacctgaagccgcggggggaccgtcagtcttcctcttccccccaaaacccaaggacaccctcatgatctcccggacccctgaggtcacatgcgtggtggtggacgtgagccacgaagaccctgaggtcaagttcaactggtacgtggacggcgtggaggtgcataatgccaagacaaagccgcgggaggagcagtacgccagcacgtaccgtgtggtcagcgtcctcaccgtcctgcaccaggactggctgaatggcaaggagtacaagtgcgcggtctccaacaaagccctcccagcccccatcgagaaaaccatctccaaagccaaagggcagccccgagaaccacaggtgtgtaccctgcccccatcccgggatgagctgaccaagaaccaggtcagcctgtcctgcgccgtcaaaggcttctatcccagcgacatcgccgtggagtgggagagcaatgggcagccggagaacaactacaagaccacgcctcccgtgctggactccgacggctccttcttcctcgtgagcaagctcaccgtggacaagagcaggtggcagcaggggaacgtcttctcatgctccgtgatgcatgaggctctgcacaaccactacacgcagaagagcctctccctgtctccgggtaaa

SEQ ID NO: 188 - protein, 469 aa, Artificial Sequence
  Synthesized
FLNSLFNQEVQIPLTESYCGPCPKNWICYKNNCYQFFDESKNWYESQASCMSQNASLLKVYSKEDQDLLKLVKSYHWMGLVHIPTNGSWQWEDGSILSPNLLTIIEMQKGDCALYASSFKGYIENCSTPNTYICMQRTVASTKGPSVFPLAPSSKSTSGGTAALGCLVKDYFPEPVTVSWNSGALTSGVHTFPAVLQSSGLYSLSSVVTVPSSSLGTQTYICNVNHKPSNTKVDKRVEPKSCDKTHTCPPCPAPEAAGGPSVFLFPPKPKDTLMISRTPEVTCVVVDVSHEDPEVKFNWYVDGVEVHNAKTKPREEQYASTYRVVSVLTVLHQDWLNGKEYKCAVSNKALPAPIEKTISKAKGQPREPQVCTLPPSRDELTKNQVSLSCAVKGFYPSDIAVEWESNGQPENNYKTTPPVLDSDGSFFLVSKLTVDKSRWQQGNVFSCSVMHEALHNHYTQKSLSLSPGK

SEQ ID NO: 189 - DNA, 1119 bp, Artificial Sequence
  Synthesized
tttcttaattcccttttcaaccaagaggttcagatccccttgactgaaagctattgcggcccttgtccgaaaaactggatatgttacaagaataattgttaccaattcttcgacgaaagcaagaactggtatgagagtcaggcgtcttgtatgagtcagaatgccagcctgcttaaggtttattcaaaagaagaccaggatctgcttaagttggtaaagagctaccactggatggggctggtacatatcccaacgaatgggtcatggcagtgggaggacggttctattctgagtccaaatctcctgacgatcatcgaaatgcagaaaggggactgtgccctgtatgcatcatccttcaaggggtacatcgagaactgcagtaccccaaatacctacatttgtatgcaaagaacggttgctagcgagcccaaatcttctgacaaaactcacacatgcccaccgtgcccagcacctgaagccgcggggggaccgtcagtcttcctcttccccccaaaacccaaggacaccctcatgatctcccggacccctgaggtcacatgcgtggtggtggacgtgagccacgaagaccctgaggtcaagttcaactggtacgtggacggcgtggaggtgcataatgccaagacaaagccgcgggaggagcagtacgccagcacgtaccgtgtggtcagcgtcctcaccgtcctgcaccaggactggctgaatggcaaggagtacaagtgcgcggtctccaacaaagccctcccagcccccatcgagaaaaccatctccaaagccaaagggcagccccgagaaccacaggtgtacaccctgcccccatcccgggatgagctgaccaagaaccaggtcagcctgacctgcctggtcaaaggcttctatcccagcgacatcgccgtggagtgggagagcaatgggcagccggagaacaactacaagaccacgcctcccgtgctggactccgacggctccttcttcctctatagcaagctcaccgtggacaagagcaggtggcagcaggggaacgtcttctcatgctccgtgatgcatgaggctctgcacaaccactacacgcagaagagcctctccctgtctccgggtaaa

SEQ ID NO: 190 - protein, 373 aa, Artificial Sequence
  Synthesized
FLNSLFNQEVQIPLTESYCGPCPKNWICYKNNCYQFFDESKNWYESQASCMSQNASLLKVYSKEDQDLLKLVKSYHWMGLVHIPTNGSWQWEDGSILSPNLLTIIEMQKGDCALYASSFKGYIENCSTPNTYICMQRTVASEPKSSDKTHTCPPCPAPEAAGGPSVFLFPPKPKDTLMISRTPEVTCVVVDVSHEDPEVKFNWYVDGVEVHNAKTKPREEQYASTYRVVSVLTVLHQDWLNGKEYKCAVSNKALPAPIEKTISKAKGQPREPQVYTLPPSRDELTKNQVSLTCLVKGFYPSDIAVEWESNGQPENNYKTTPPVLDSDGSFFLYSKLTVDKSRWQQGNVFSCSVMHEALHNHYTQKSLSLSPGK

SEQ ID NO: 191 - DNA, 1119 bp, Artificial Sequence
  Synthesized
tttcttaattcccttttcaaccaagaggttcagatccccttgactgaaagctattgcggcccttgtccgaaaaactggatatgttacaagaataattgttaccaattcttcgacgaaagcaagaactggtatgagagtcaggcgtcttgtatgagtcagaatgccagcctgcttaaggtttattcaaaagaagaccaggatctgcttaagttggtaaagagctaccactggatggggctggtacatatcccaacgaatgggtcatggcagtgggaggacggttctattctgagtccaaatctcctgacgatcatcgaaatgcagaaaggggactgtgccctgtatgcatcatccttcaaggggtacatcgagaactgcagtaccccaaatacctacatttgtatgcaaagaacggttgctagcgagcccaaatcttctgacaaaactcacacatgcccaccgtgcccagcacctgaagccgcggggggaccgtcagtcttcctcttccccccaaaacccaaggacaccctcatgatctcccggacccctgaggtcacatgcgtggtggtggacgtgagccacgaagaccctgaggtcaagttcaactggtacgtggacggcgtggaggtgcataatgccaagacaaagccgcgggaggagcagtacgccagcacgtaccgtgtggtcagcgtcctcaccgtcctgcaccaggactggctgaatggcaaggagtacaagtgcgcggtctccaacaaagccctcccagcccccatcgagaaaaccatctccaaagccaaagggcagccccgagaaccacaggtgtacaccctgcccccatgtcgggatgagctgaccaagaaccaggtcagcctgtggtgcctggtcaaaggcttctatcccagcgacatcgccgtggagtgggagagcaatgggcagccggagaacaactacaagaccacgcctcccgtgctggactccgacggctccttcttcctctatagcaagctcaccgtggacaagagcaggtggcagcaggggaacgtcttctcatgctccgtgatgcatgaggctctgcacaaccactacacgcagaagagcctctccctgtctccgggtaaa

SEQ ID NO: 192 - protein, 373 aa, Artificial Sequence
  Synthesized
FLNSLFNQEVQIPLTESYCGPCPKNWICYKNNCYQFFDESKNWYESQASCMSQNASLLKVYSKEDQDLLKLVKSYHWMGLVHIPTNGSWQWEDGSILSPNLLTIIEMQKGDCALYASSFKGYIENCSTPNTYICMQRTVASEPKSSDKTHTCPPCPAPEAAGGPSVFLFPPKPKDTLMISRTPEVTCVVVDVSHEDPEVKFNWYVDGVEVHNAKTKPREEQYASTYRVVSVLTVLHQDWLNGKEYKCAVSNKALPAPIEKTISKAKGQPREPQVYTLPPCRDELTKNQVSLWCLVKGFYPSDIAVEWESNGQPENNYKTTPPVLDSDGSFFLYSKLTVDKSRWQQGNVFSCSVMHEALHNHYTQKSLSLSPGK

SEQ ID NO: 193 - DNA, 1119 bp, Artificial Sequence
  Synthesized
tttcttaattcccttttcaaccaagaggttcagatccccttgactgaaagctattgcggcccttgtccgaaaaactggatatgttacaagaataattgttaccaattcttcgacgaaagcaagaactggtatgagagtcaggcgtcttgtatgagtcagaatgccagcctgcttaaggtttattcaaaagaagaccaggatctgcttaagttggtaaagagctaccactggatggggctggtacatatcccaacgaatgggtcatggcagtgggaggacggttctattctgagtccaaatctcctgacgatcatcgaaatgcagaaaggggactgtgccctgtatgcatcatccttcaaggggtacatcgagaactgcagtaccccaaatacctacatttgtatgcaaagaacggttgctagcgagcccaaatcttctgacaaaactcacacatgcccaccgtgcccagcacctgaagccgcggggggaccgtcagtcttcctcttccccccaaaacccaaggacaccctcatgatctcccggacccctgaggtcacatgcgtggtggtggacgtgagccacgaagaccctgaggtcaagttcaactggtacgtggacggcgtggaggtgcataatgccaagacaaagccgcgggaggagcagtacgccagcacgtaccgtgtggtcagcgtcctcaccgtcctgcaccaggactggctgaatggcaaggagtacaagtgcgcggtctccaacaaagccctcccagcccccatcgagaaaaccatctccaaagccaaagggcagccccgagaaccacaggtgtgtaccctgcccccatcccgggatgagctgaccaagaaccaggtcagcctgtcctgcgccgtcaaaggcttctatcccagcgacatcgccgtggagtgggagagcaatgggcagccggagaacaactacaagaccacgcctcccgtgctggactccgacggctccttcttcctcgtgagcaagctcaccgtggacaagagcaggtggcagcaggggaacgtcttctcatgctccgtgatgcatgaggctctgcacaaccactacacgcagaagagcctctccctgtctccgggtaaa

SEQ ID NO: 194 - protein, 373 aa, Artificial Sequence
  Synthesized
FLNSLFNQEVQIPLTESYCGPCPKNWICYKNNCYQFFDESKNWYESQASCMSQNASLLKVYSKEDQDLLKLVKSYHWMGLVHIPTNGSWQWEDGSILSPNLLTIIEMQKGDCALYASSFKGYIENCSTPNTYICMQRTVASEPKSSDKTHTCPPCPAPEAAGGPSVFLFPPKPKDTLMISRTPEVTCVVVDVSHEDPEVKFNWYVDGVEVHNAKTKPREEQYASTYRVVSVLTVLHQDWLNGKEYKCAVSNKALPAPIEKTISKAKGQPREPQVCTLPPSRDELTKNQVSLSCAVKGFYPSDIAVEWESNGQPENNYKTTPPVLDSDGSFFLVSKLTVDKSRWQQGNVFSCSVMHEALHNHYTQKSLSLSPGK

SEQ ID NO: 195 - DNA, 354 bp, Artificial Sequence
  Synthesized
caggtccaactgcagcagcctggggctgagctggtgaggcctggggcttcagtgaagctgtcctgcaaggcttctggctacaccttcaccagctactggataaactgggtgaagcagaggcctggacaaggccttgagtggatcggaaatatttatccttctgatagttatactaactacaatcaaaagttcaaggacaaggccacattgactgtagacaaatcctccagcacagcctacatgcagctcagcagcccgacatctgaggactctgcggtctattactgtacaagatcgtggaggggtaactcctttgactactggggccaaggcaccactctcacagtctcctca

SEQ ID NO: 196 - protein, 118 aa, Artificial Sequence
  Synthesized
QVQLQQPGAELVRPGASVKLSCKASGYTFTSYWINWVKQRPGQGLEWIGNIYPSDSYTNYNQKFKDKATLTVDKSSSTAYMQLSSPTSEDSAVYYCTRSWRGNSFDYWGQGTTLTVSS

SEQ ID NO: 197 - DNA, 339 bp, Artificial Sequence
  Synthesized
gacattgtgatgacacagtctccatcctccctgactgtgacagcaggagagaaggtcactatgagctgcaagtccagtcagagtctgttaaacagtggaaatcaaaagaactacttgacctggtaccagcagaaaccagggcagcctcctaaactgttgatctactgggcatccactagggaatctggggtccctgatcgcttcacaggcagtggatctggaacagatttcactctcaccatcagcagtgtgcaggctgaagacctggcagtttattactgtcagaatgattatagttatccattcacgttcggctcggggacaaagttggaaataaaa

SEQ ID NO: 198 - protein, 113 aa, Artificial Sequence
  Synthesized
DIVMTQSPSSLTVTAGEKVTMSCKSSQSLLNSGNQKNYLTWYQQKPGQPPKLLIYWASTRESGVPDRFTGSGSGTDFTLTISSVQAEDLAVYYCQNDYSYPFTFGSGTKLEIK

SEQ ID NO: 199 - DNA, 360 bp, Artificial Sequence
  Synthesized
gaggttcagctggtggagtctggcggtggcctggtgcagccagggggctcactccgtttgtcctgtgcagcttctggcttcaacattaaagacacctatatacactgggtgcgtcaggccccgggtaagggcctggaatgggttgcaaggatttatcctacgaatggttatactagatatgccgatagcgtcaagggccgtttcactataagcgcagacacatccaaaaacacagcctacctgcagatgaacagcctgcgtgctgaggacactgccgtctattattgttctagatggggaggggacggcttctatgctatggactactggggtcaaggaaccctggtcaccgtctcctcg

SEQ ID NO: 200 - protein, 120 aa, Artificial Sequence [sequence omitted]

SEQ ID NO: 201 - DNA, 321 bp, Artificial Sequence
  Synthesized
gatatccagatgacccagtccccgagctccctgtccgcctctgtgggcgatagggtcaccatcacctgccgtgccagtcaggatgtgaatactgctgtagcctggtatcaacagaaaccaggaaaagctccgaaactactgatttactcggcatccttcctctactctggagtcccttctcgcttctctggctccagatctgggacggatttcactctgaccatcagcagtctgcagccggaagacttcgcaacttattactgtcagcaacattatactactcctcccacgttcggacagggtaccaaggtggagatcaaa

SEQ ID NO: 202 - protein, 107 aa, Artificial Sequence [sequence omitted]

SEQ ID NO: 203 - DNA, 357 bp, Artificial Sequence
  Synthesized
gaagtgcagctcgtcgaaagcggtggcggactggttcagcccggtggttctctgcggctgtcttgtgctgcctcgggtttcacgttcactgactacacaatggactgggtgcgtcaggctcctggaaagggattggagtgggtagccgacgttaatccaaactccggcgggagcatctacaaccagaggttcaaggggaggttcactctgagcgtggatcgctccaagaacacgctgtacctccagatgaactctctcagggccgaggacacggctgtttactattgcgcgaggaacctgggtccttccttctacttcgactactggggacagggaaccctggtgaccgtcagctcc

SEQ ID NO: 204 - protein, 119 aa, Artificial Sequence [sequence omitted]

SEQ ID NO: 205 - DNA, 321 bp, Artificial Sequence
  Synthesized
gacatccagatgacacaatctcctagcagtctgagcgcaagtgttggagatcgtgtcaccatcacatgcaaggccagccaggatgtgagcattggagtcgcctggtatcagcagaaacccggcaaggcacccaagctgctgatctactcggccagttacagatacactggcgtaccttcgaggtttagtggtagcggttctggaaccgatttcaccctcaccattagctccctccaacccgaggacttcgccacctactactgccagcaatactacatctacccttacacgttcggccaaggcactaaggtcgagattaaa

SEQ ID NO: 206 - protein, 107 aa, Artificial Sequence [sequence omitted]

SEQ ID NO: 207 - DNA, 357 bp, Artificial Sequence
  Synthesized
caggtacaactgcagcagtctgggcctgagctggagaagcctggcgcttcagtgaagatatcctgcaaggcttctggttactcattcactggctacaccatgaactgggtgaagcagagccatggaaagagccttgagtggattggacttattactccttacaatggtgcttctagctacaaccagaagttcaggggcaaggccacattaactgtagacaagtcatccagcacagcctacatggacctcctcagtctgacatctgaagactctgcagtctatttctgtgcaagggggggttacgacgggaggggttttgactactggggatctgggaccccggtcaccgtctcctca

SEQ ID NO: 208 - protein, 119 aa, Artificial Sequence
  Synthesized
QVQLQQSGPELEKPGASVKISCKASGYSFTGYTMNWVKQSHGKSLEWIGLITPYNGASSYNQKFRGKATLTVDKSSSTAYMDLLSLTSEDSAVYFCARGGYDGRGFDYWGSGTPVTVSS

SEQ ID NO: 209 - DNA, 318 bp, Artificial Sequence
  Synthesized
gacatcgagctcactcagtctccagcaatcatgtctgcatctccaggggagaaggtcaccatgacctgcagtgccagctcaagtgtaagttacatgcactggtaccagcagaagtcaggcacctcccccaaaagatggatttatgacacatccaaactggcttctggagtcccaggtcgcttcagtggcagtgggtctggaaactcttactctctcacaatcagcagcgtggaggctgaagatgatgcaacttattactgccagcagtggagtaagcaccctctcacgttcggatccgggaccaaggtggaaatcaaa

SEQ ID NO: 210 - protein, 106 aa, Artificial Sequence
  Synthesized
DIELTQSPAIMSASPGEKVTMTCSASSSVSYMHWYQQKSGTSPKRWIYDTSKLASGVPGRFSGSGSGNSYSLTISSVEAEDDATYYCQQWSKHPLTFGSGTKVEIK

SEQ ID NO: 211 - DNA, 339 bp, Artificial Sequence
  Synthesized
gaggtccaactgctgcagtctggacctgagctggagaagcctggcgcttcagtgatgatatcctgcaaggcttctggttcctcattcactggctacaacatgaactgggtgaggcagaacattggaaagagccttgaatggattggagctattgatccttactatggtggaactagctacaaccagaagttcaagggcagggccacattgactgtagacaaatcgtccagcacagcctacatgcacctcaagagcctgacatctgaggactctgcagtctattactgtgtaagcggaatggagtactggggtcaaggaacctcagtcaccgtctcctca

SEQ ID NO: 212 - protein, 113 aa, Artificial Sequence [sequence omitted]

SEQ ID NO: 213 - DNA, 339 bp, Artificial Sequence
  Synthesized
gaaatagtgatgacgcagtctccagccaccctgtctgtgtctccaggggaaagagccaccctctcctgcagatctagtcagagtcttgtacaccgtaatggaaacacctatttacattggtacctgcagaagccaggccagtctccaaagctcctgattcacaaagtttccaaccgattttctggggtcccagacaggttcagtggcagtggatcagggacagatttcacactcaagatcagcagagtggaggctgaggatctgggagtttatttctgttctcaaagtacacatgttcctccgctcacgttcggtgctgggaccaagctggagctgaaa

SEQ ID NO: 214 - protein, 113 aa, Artificial Sequence [sequence omitted]

SEQ ID NO: 215 - DNA, 363 bp, Artificial Sequence
  Synthesized
caggtgcagctgcagcagcccggcgccgagctggtgaagcccggcgccagcgtgaagatgagctgcaaggccagcggctacaccttcaccagctacaacatgcactgggtgaagcagacccccggccggggcctggagtggatcggcgccatctaccccggcaacggcgacaccagctacaaccagaagttcaagggcaaggccaccctgaccgccgacaagagcagcagcaccgcctacatgcagctgagcagcctgaccagcgaggacagcgccgtgtactactgcgcccggagcacctactacggcggcgactggtacttcaacgtgtggggcgccggcaccaccgtgaccgtgagcgcc

SEQ ID NO: 216 - protein, 121 aa, Artificial Sequence [sequence omitted]

SEQ ID NO: 217 - DNA, 318 bp, Artificial Sequence
  Synthesized
cagatcgtgctgagccagagccccgccatcctgagcgccagccccggcgagaaggtgaccatgacctgccgggccagcagcagcgtgagctacatccactggttccagcagaagcccggcagcagccccaagccctggatctacgccaccagcaacctggccagcggcgtgcccgtgcggttcagcggcagcggcagcggcaccagctacagcctgaccatcagccgggtggaggccgaggacgccgccacctactactgccagcagtggaccagcaacccccccaccttcggcggcggcaccaagctggagatcaag

SEQ ID NO: 218 - protein, 106 aa, Artificial Sequence [sequence omitted]

SEQ ID NO: 219 - DNA, 357 bp, Artificial Sequence
  Synthesized
caggtgcagctgaagcagtcaggacctggcctagtgcagccctcacagagcctgtccatcacctgcacagtctctggtttctcattaactaactatggtgtacactgggttcgccagtctccaggaaagggtctggagtggctgggagtgatatggagtggtggaaacacagactataatacacctttcacatccagactgagcatcaacaaggacaattccaagagccaagttttctttaaaatgaacagtctgcaatctaatgacacagccatatattactgtgccagagccctcacctactatgattacgagtttgcttactggggccaagggactctggtcactgtctctagc

SEQ ID NO: 220 - protein, 119 aa, Artificial Sequence
  Synthesized
QVQLKQSGPGLVQPSQSLSITCTVSGFSLTNYGVHWVRQSPGKGLEWLGVIWSGGNTDYNTPFTSRLSINKDNSKSQVFFKMNSLQSNDTAIYYCARALTYYDYEFAYWGQGTLVTVSS

SEQ ID NO: 221 - DNA, 321 bp, Artificial Sequence
  Synthesized
gacatcttgctgactcagtctccagtcatcctgtctgtgagtccaggagaaagagtcagtttctcctgcagggccagtcagagtattggcacaaacatacactggtatcagcaaagaacaaatggttctccaaggcttctcataaagtatgcttctgagtctatctctgggattccttccaggtttagtggcagtggatcagggacagattttactcttagcatcaacagtgtggagtctgaagatattgcagattattactgtcaacaaaataataactggccaaccacgttcggtgctgggaccaagctggagctgaaa

SEQ ID NO: 222 - protein, 107 aa, Artificial Sequence
  Synthesized
DILLTQSPVILSVSPGERVSFSCRASQSIGTNIHWYQQRTNGSPRLLIKYASESISGIPSRFSGSGSGTDFTLSINSVESEDIADYYCQQNNNWPTTFGAGTKLELK

SEQ ID NO: 223 - DNA, 357 bp, Artificial Sequence
  Synthesized
caggtgcagctgcaggagtcgggcccaggactggtgaagccttcggagaccctgtccctcacctgcactgtctctggtggctccgtcagcagtggtgattactactggacctggatccggcagtccccagggaagggactggagtggattggacacatctattacagtgggaacaccaattataacccctccctcaagagccgactcaccatatcaattgacacgtccaagactcagttctccctgaagctgagttctgtgaccgctgcggacacggccatttattactgtgtgcgagatcgagtgactggtgcttttgatatctggggccaagggacaatggtcaccgtctcgagc

SEQ ID NO: 224 - protein, 119 aa, Artificial Sequence [sequence omitted]

SEQ ID NO: 225 - DNA, 321 bp, Artificial Sequence
  Synthesized
gacatccagatgacccagtctccatcctccctgtctgcatctgtaggagacagagtcaccatcacttgccaggcgagtcaggacatcagcaactatttaaattggtatcagcagaaaccagggaaagcccctaaactcctgatctacgatgcatccaatttggaaacaggggtcccatcaaggttcagtggaagtggatctgggacagattttactttcaccatcagcagcctgcagcctgaagatattgcaacatatttctgtcaacactttgatcatctcccgctcgctttcggcggagggaccaaggtggaaattaaa

SEQ ID NO: 226 - protein, 107 aa, Artificial Sequence [sequence omitted]

SEQ ID NO: 227 - DNA, 369 bp, Artificial Sequence
  Synthesized
caggtgcagctgcagcagagcggcgccgaggtgaagaagcccggcagcagcgtgaaggtgagctgcaaggccagcggctacaccttcaccaactactacatctactgggtgcggcaggcccccggccagggcctggagtggatcggcggcatcaaccccaccagcggcggcagcaacttcaacgagaagttcaagacccgggtgaccatcaccgccgacgagagcagcaccaccgcctacatggagctgagcagcctgcggagcgaggacaccgccttctacttctgcacccggcagggcctgtggttcgacagcgacggccggggcttcgacttctggggccagggcaccaccgtgaccgtgagcagc

SEQ ID NO: 228 - protein, 123 aa, Artificial Sequence [sequence omitted]

SEQ ID NO: 229 - DNA, 336 bp, Artificial Sequence
  Synthesized
gatattcaaatgactcaatctccttcttctctttctgcttctgttggtgatcgtgttactattacttgtcgttcttctcaaaatattgttcattctaatggtaatacttatcttgattggtatcaacaaactcctggtaaagctcctaaacttcttatttataaagtttctaatcgtttttctggtgttccttctcgtttttctggttctggttctggtactgattttacttttactatttcttctcttcaacctgaagatattgctacttattattgttttcaatattctcatgttccttggacttttggtcaaggtactaaacttcaaattact

SEQ ID NO: 230 - protein, 112 aa, Artificial Sequence [sequence omitted]

SEQ ID NO: 231 - DNA, 363 bp, Artificial Sequence
  Synthesized
gaggtgcaattggtccagtcaggagcagaggttaagaagcctggtgcttccgtcaaagtttcgtgtaaggccagcggctacaggttcacaaattattggattcattgggtcaggcaggctccgggacaaggcctggaatggatcggtggcattaatcccgggaataactacgctacatataggagaaaattccagggcagagttacgatgaccgcggacacctccacaagcactgtctacatggagctgtcatctctgagatccgaggacaccgcagtgtactattgtactagagaaggctacggtaattacggagcctggttcgcctactggggccagggtaccctagtcacagtctcctca

SEQ ID NO: 232 - protein, 121 aa, Artificial Sequence
  Synthesized
EVQLVQSGAEVKKPGASVKVSCKASGYRFTNYWIHWVRQAPGQGLEWIGGINPGNNYATYRRKFQGRVTMTADTSTSTVYMELSSLRSEDTAVYYCTREGYGNYGAWFAYWGQGTLVTVSS

SEQ ID NO: 233 - DNA, 336 bp, Artificial Sequence
  Synthesized
gacgttcaagtgacccagagcccatccagcctgagcgcatctgtaggagaccgggtcaccatcacttgtagatccagtcagagtcttgcaaacagttatgggaacacctttttgtcttggtatctgcacaaaccaggtaaagccccacaattgctcatctacggaatctctaacagatttagtggtgtaccagacaggttcagcggttccggaagtggtactgatttcaccctcacgatctcgtctctccagccagaagatttcgccacttattactgtttacaaggtacacatcagccgtacacattcggtcagggtactaaagtagaaatcaaa

SEQ ID NO: 234 - protein, 112 aa, Artificial Sequence
  Synthesized
DVQVTQSPSSLSASVGDRVTITCRSSQSLANSYGNTFLSWYLHKPGKAPQLLIYGISNRFSGVPDRFSGSGSGTDFTLTISSLQPEDFATYYCLQGTHQPYTFGQGTKVEIK

SEQ ID NO: 235 - DNA, 351 bp, Artificial Sequence
  Synthesized
cagatccagctgcagcagtctggacctgaggtggtgaagcctggggcttcagtgaagatatcctgcaaggcttctggctacaccttcactgactactatataacctgggtgaagcagaagcctggacagggacttgagtggattggatggatttatcctggaagcggtaatactaagtacaatgagaagttcaagggcaaggccacattgactgtagacacatcctccagcacagccttcatgcagctcagcagcctgacatctgaggacactgctgtctatttctgtgcgaactatggtaactactggtttgcttactggggccaagggactcaggtcactgtctctgca

SEQ ID NO: 236 - protein, 117 aa, Artificial Sequence
  Synthesized
QIQLQQSGPEVVKPGASVKISCKASGYTFTDYYITWVKQKPGQGLEWIGWIYPGSGNTKYNEKFKGKATLTVDTSSSTAFMQLSSLTSEDTAVYFCANYGNYWFAYWGQGTQVTVSA

SEQ ID NO: 237 - DNA, 333 bp, Artificial Sequence
  Synthesized
gacattgtgctgacccaatctccagcttctttggctgtgtctctagggcagagggccaccatctcctgcaaggccagccaaagtgttgattttgatggtgatagttatatgaactggtaccaacagaaaccaggacagccacccaaagtcctcatctatgctgcatccaatctagaatctgggatcccagccaggtttagtggcagtgggtctgggacagacttcaccctcaacatccatcctgtggaggaggaggatgctgcaacctattactgtcagcaaagtaatgaggatccgtggacgttcggtggaggcaccaagctggaaatcaaa

SEQ ID NO: 238 - protein, 111 aa, Artificial Sequence
  Synthesized
DIVLTQSPASLAVSLGQRATISCKASQSVDFDGDSYMNWYQQKPGQPPKVLIYAASNLESGIPARFSGSGSGTDFTLNIHPVEEEDAATYYCQQSNEDPWTFGGGTKLEIK

SEQ ID NO: 239 - DNA, 354 bp, Artificial Sequence
  Synthesized
caggtgcaattgcaggagtcggggggaggcctggtcaagcctggagggtccctgagactctcctgtgcagcctctggattcacctttagtagttattggatgagctgggtccgccaggctccagggaaggggctggagtgggtggccaacataaaccgcgatggaagtgcgagttactatgtggactctgtgaagggccgattcaccatctccagagacgacgccaagaactcactgtatctgcaaatgaacagcctgagagctgaggacacggctgtgtattactgtgcgagagatcgtggggtgggctacttcgatctctggggccgtggcaccctggtcaccgtctcgagc

SEQ ID NO: 240 - protein, 118 aa, Artificial Sequence
  Synthesized
QVQLQESGGGLVKPGGSLRLSCAASGFTFSSYWMSWVRQAPGKGLEWVANINRDGSASYYVDSVKGRFTISRDDAKNSLYLQMNSLRAEDTAVYYCARDRGVGYFDLWGRGTLVTVSS

SEQ ID NO: 241 - DNA, 333 bp, Artificial Sequence
  Synthesized
cagtctgccctgactcagcctgcctccgtgtctgggtctcctggacagtcgatcaccatctcctgcactggaaccagcagtgacgttggtggttataactttgtctcctggtaccaacaacacccaggcaaagcccccaaactcatgatctatgatgtcagtgatcggccctcaggggtgtctgatcgcttctccggctccaagtctggcaacacggcctccctgatcatctctggcctccaggctgacgacgaggctgattattactgcagctcatatgggagcagcagcactcatgtgattttcggcggagggaccaaggtgaccgtccta

SEQ ID NO: 242 - protein, 111 aa, Artificial Sequence
  Synthesized
QSALTQPASVSGSPGQSITISCTGTSSDVGGYNFVSWYQQHPGKAPKLMIYDVSDRPSGVSDRFSGSKSGNTASLIISGLQADDEADYYCSSYGSSSTHVIFGGGTKVTVL

SEQ ID NO: 243 - DNA, 348 bp, Artificial Sequence
  Synthesized
gatgtgcagcttcaggagtcgggacctagcctggtgaaaccttctcagtctctgtccctcacctgcactgtcactggctactcaatcaccagtgattttgcctggaactggattcggcagtttccaggaaacaagctggagtggatgggctacataagttatagtggtaacactaggtacaacccatctctcaaaagtcgaatctctatcactcgcgacacatccaagaaccaattcttcctgcagttgaactctgtgactattgaggacacagccacatattactgtgtaacggcgggacgcgggtttccttattggggccaagggactctggtcactgtctctgca

SEQ ID NO: 244 - protein, 116 aa, Artificial Sequence
  Synthesized
DVQLQESGPSLVKPSQSLSLTCTVTGYSITSDFAWNWIRQFPGNKLEWMGYISYSGNTRYNPSLKSRISITRDTSKNQFFLQLNSVTIEDTATYYCVTAGRGFPYWGQGTLVTVSA

SEQ ID NO: 245 - DNA, 321 bp, Artificial Sequence
  Synthesized
gacatcctgatgacccaatctccatcctccatgtctgtatctctgggagacacagtcagcatcacttgccattcaagtcaggacattaacagtaatatagggtggttgcagcagagaccagggaaatcatttaagggcctgatctatcatggaaccaacttggacgatgaagttccatcaaggttcagtggcagtggatctggagccgattattctctcaccatcagcagcctggaatctgaagattttgcagactattactgtgtacagtatgctcagtttccgtggacgttcggtggaggcaccaagctggaaatcaaa

SEQ ID NO: 246 - protein, 107 aa, Artificial Sequence
  Synthesized
DILMTQSPSSMSVSLGDTVSITCHSSQDINSNIGWLQQRPGKSFKGLIYHGTNLDDEVPSRFSGSGSGADYSLTISSLESEDFADYYCVQYAQFPWTFGGGTKLEIK

SEQ ID NO: 247 - DNA, 363 bp, Artificial Sequence
  Synthesized
gaggtgcagctggtgcagtctggagcagaggtgaagaaaccaggagagtctctgaagatctcctgtaagggttctggatacagctttagcagttcatggatcggctgggtgcgccaggcacctgggaaaggcctggaatggatggggatcatctatcctgatgactctgataccagatacagtccatccttccaaggccaggtcaccatctcagccgacaagtccatcaggactgcctacctgcagtggagtagcctgaaggcctcggacaccgctatgtattactgtgcgagacatgttactatgatttggggagttattattgacttctggggccagggaaccctggtcaccgtctcctca

SEQ ID NO: 248 - protein, 121 aa, Artificial Sequence
  Synthesized
EVQLVQSGAEVKKPGESLKISCKGSGYSFSSSWIGWVRQAPGKGLEWMGIIYPDDSDTRYSPSFQGQVTISADKSIRTAYLQWSSLKASDTAMYYCARHVTMIWGVIIDFWGQGTLVTVSS

SEQ ID NO: 249 - DNA, 321 bp, Artificial Sequence
  Synthesized
gccatccagttgacccagtctccatcctccctgtctgcatctgtaggagacagagtcaccatcacttgccgggcaagtcagggcattagcagtgctttagcctggtatcagcagaaaccagggaaagctcctaagctcctgatctatgatgcctccagtttggaaagtggggtcccatcaaggttcagcggcagtggatctgggacagatttcactctcaccatcagcagcctgcagcctgaagattttgcaacttattactgtcaacagtttaatagttacccattcactttcggccctgggaccaaagtggatatcaaa

SEQ ID NO: 250 - protein, 107 aa, Artificial Sequence
  Synthesized
AIQLTQSPSSLSASVGDRVTITCRASQGISSALAWYQQKPGKAPKLLIYDASSLESGVPSRFSGSGSGTDFTLTISSLQPEDFATYYCQQFNSYPFTFGPGTKVDIK

SEQ ID NO: 251 - DNA, 348 bp, Artificial Sequence
  Synthesized
gaggtccaattggtacaatccggcgctgaggttaagaaaccgggttcctcagtcaaagttagttgtaaggcatcaggttacacgatcactgatagtaacatacattgggtgagacaggctcctgggcagtcccttgagtggattggatacatttatccatataatggcggcacggattacaaccagaaatttaagaatagagcgacactgaccgttgacaaccccaccaataccgcgtatatggaattgtcaagcctgaggtctgaggacacggccttctactattgcgtaaacggtaacccgtggctggcctactgggggcaggggacactcgtaaccgtctcttct

SEQ ID NO: 252 - protein, 116 aa, Artificial Sequence [sequence omitted]

SEQ ID NO: 253 - DNA, 333 bp, Artificial Sequence
  Synthesized
gatatacaacttacgcagtctccctccactctgtcagcgtccgtaggggacagagtaacgataacatgcagggcctcagaaagtcttgacaactacggcataaggttcctcacatggtttcaacagaagccgggtaaagcaccaaaactcctgatgtatgctgcgtctaaccaggggtccggtgttcctagtcggttttcaggcagcggtagcggtaccgagttcactctcacaatttccagtcttcagcctgacgatttcgcaacgtattattgccaacaaactaaggaagtgccttggagctttgggcaaggcaccaaggtcgaggtgaag

SEQ ID NO: 254 - protein, 111 aa, Artificial Sequence [sequence omitted]

SEQ ID NO: 255 - DNA, 360 bp, Artificial Sequence
  Synthesized
gaggtgcagctggtggagtctgggggaggcttggtccagcctggggggtccctgagactctcctgtgcagcctctggattcaccatcagtaccaatgcaatgagctgggtccgccaggctccagggaaggggctggagtggatcggagtcattactggtcgtgatatcacatactacgcgagctgggcgaaaggcagattcaccatctccagagacaattccaagaacacgctgtatcttcaaatgaacagcctgagagccgaggacacggctgtgtattactgtgcgagagacggtggttcttctgctattactagtaacaacatttggggccagggaaccctggtcaccgtgtcgaca

SEQ ID NO: 256 - protein, 120 aa, Artificial Sequence
  Synthesized
EVQLVESGGGLVQPGGSLRLSCAASGFTISTNAMSWVRQAPGKGLEWIGVITGRDITYYASWAKGRFTISRDNSKNTLYLQMNSLRAEDTAVYYCARDGGSSAITSNNIWGQGTLVTVST

SEQ ID NO: 257 - DNA, 336 bp, Artificial Sequence
  Synthesized
gacgtcgtgatgacccagtctccttccaccctgtctgcatctgtaggagacagagtcaccatcaattgccaagccagtgagagcattagcagttggttagcctggtatcagcagaaaccagggaaagcccctaagctcctgatctatgaagcatccaaactggcatctggggtcccatcaaggttcagcggcagtggatctgggacagaatttactctcaccatcagcagcctgcagcctgatgattttgcaacttattactgccaaggctatttttattttattagtcgtacttatgtaaattctttcggcggagggaccaaggtggagatcaaa

SEQ ID NO: 258 - protein, 112 aa, Artificial Sequence
  Synthesized
DVVMTQSPSTLSASVGDRVTINCQASESISSWLAWYQQKPGKAPKLLIYEASKLASGVPSRFSGSGSGTEFTLTISSLQPDDFATYYCQGYFYFISRTYVNSFGGGTKVEIK

SEQ ID NO: 259 - DNA, 366 bp, Artificial Sequence
  Synthesized
gaggtgcagctgttggagtctgggggaggcttggtacagcctggggggtccctgagactctcctgtgcagcctctggattctccttcagtagcgggtacgacatgtgctgggtccgccaggctccagggaaggggctggagtggatcgcatgcattgctgctggtagtgctggtatcacttacgacgcgaactgggcgaaaggccggttcaccatctccagagacaattccaagaacacgctgtatctgcaaatgaacagcctgagagccgaggacacggccgtatattactgtgcgagatcggcgttttcgttcgactacgccatggacctctggggccagggaaccctggtcaccgtctcgagc

SEQ ID NO: 260 - protein, 122 aa, Artificial Sequence
  Synthesized
EVQLLESGGGLVQPGGSLRLSCAASGFSFSSGYDMCWVRQAPGKGLEWIACIAAGSAGITYDANWAKGRFTISRDNSKNTLYLQMNSLRAEDTAVYYCARSAFSFDYAMDLWGQGTLVTVSS

SEQ ID NO: 261 - DNA, 330 bp, Artificial Sequence
  Synthesized
gacatccagatgacccagtctccttccaccctgtctgcatctgtaggagacagagtcaccatcacttgccaggccagtcagagcattagttcccacttaaactggtatcagcagaaaccagggaaagcccctaagctcctgatctataaggcatccactctggcatctggggtcccatcaaggttcagcggcagtggatctgggacagaatttactctcaccatcagcagcctgcagcctgatgattttgcaacttattactgccaacagggttatagttggggtaatgttgataatgttttcggcggagggaccaaggtggagatcaaa

SEQ ID NO: 262 - protein, 110 aa, Artificial Sequence
  Synthesized
DIQMTQSPSTLSASVGDRVTITCQASQSISSHLNWYQQKPGKAPKLLIYKASTLASGVPSRFSGSGSGTEFTLTISSLQPDDFATYYCQQGYSWGNVDNVFGGGTKVEIK

SEQ ID NO: 263 - DNA, 345 bp, Artificial Sequence
  Synthesized
cggtcgctggtggagtctgggggaggcttggtccagcctggggggtccctgagactctcctgtactgcctctggattcaccatcagtagctaccacatgcagtgggtccgccaggctccagggaaggggctggagtacatcggaaccattagtagtggtggtaatgtatactacgcaagctccgctagaggcagattcaccatctccagaccctcgtccaagaacacggtggatcttcaaatgaacagcctgagagccgaggacacggctgtgtattactgtgcgagagactctggttatagtgatcctatgtggggccagggaaccctggtcaccgtctcttca

SEQ ID NO: 264 - protein, 115 aa, Artificial Sequence
  Synthesized
RSLVESGGGLVQPGGSLRLSCTASGFTISSYHMQWVRQAPGKGLEYIGTISSGGNVYYASSARGRFTISRPSSKNTVDLQMNSLRAEDTAVYYCARDSGYSDPMWGQGTLVTVSS

SEQ ID NO: 265 - DNA, 333 bp, Artificial Sequence
  Synthesized
gacgttgtgatgacccagtctccatcttccgtgtctgcatctgtaggagacagagtcaccatcacctgtcaggccagtcagaacattaggacttacttatcctggtatcagcagaaaccagggaaagcccctaagctcctgatctatgctgcagccaatctggcatctggggtcccatcaaggttcagcggcagtggatctgggacagatttcactctcaccatcagcgacctggagcctggcgatgctgcaacttactattgtcagtctacctatcttggtactgattatgttggcggtgctttcggcggagggaccaaggtggagatcaaa

SEQ ID NO: 266 - protein, 111 aa, Artificial Sequence
  Synthesized
DVVMTQSPSSVSASVGDRVTITCQASQNIRTYLSWYQQKPGKAPKLLIYAAANLASGVPSRFSGSGSGTDFTLTISDLEPGDAATYYCQSTYLGTDYVGGAFGGGTKVEIK

SEQ ID NO: 267 - DNA, 360 bp, Artificial Sequence
  Synthesized
caggtcacattgaaggaatctggccccggccttgttcagccaggacagacccttagcctcacctgtgccttcagtggtttttctcttagcactagcggtatgggggtcggctggattcggcagcctcccggcaaaggtcttgagtggttggctcacatttggtgggacgacgacaaacggtataatcctgccttgaaaagtcggctgaccattagtaaggatacctcaaaaaatcaagtgtacttgcaaatgaatagccttgacgccgaggatacggctgtatattattgcgctcggatggaactctggtcttactactttgattattgggggcaggggactctcgtcacggtctcgagt

SEQ ID NO: 268 - protein, 120 aa, Artificial Sequence
  Synthesized
QVTLKESGPGLVQPGQTLSLTCAFSGFSLSTSGMGVGWIRQPPGKGLEWLAHIWWDDDKRYNPALKSRLTISKDTSKNQVYLQMNSLDAEDTAVYYCARMELWSYYFDYWGQGTLVTVSS

SEQ ID NO: 269 - DNA, 318 bp, Artificial Sequence
  Synthesized
gaaaatgtattgacacagagccccgcctccctcagtgcctcacctggggaaagggtaactatcacttgctctgcatcaagcagcgtctcatacatgcattggtatcaacaaaagcctggacaggcccccaagctctggatatacgatacgagcaagctggcttccggcgtacctagccgcttcagtggttccggctcaggcaacgatcacacccttacgatttccagtatggaacccgaagattttgcaacttattattgtttccaggggagcgtgtacccattcactttcgggcaggggacaaaagtgaccgtccta

SEQ ID NO: 270 - protein, 106 aa, Artificial Sequence
  Synthesized
ENVLTQSPASLSASPGERVTITCSASSSVSYMHWYQQKPGQAPKLWIYDTSKLASGVPSRFSGSGSGNDHTLTISSMEPEDFATYYCFQGSVYPFTFGQGTKVTVL

SEQ ID NO: 271 - DNA, 417 bp, Artificial Sequence
  Synthesized
tttcttaattcccttttcaaccaagaggttcagatccccttgactgaaagctattgcggcccttgtccgaaaaactggatatgttacaagaataattgttaccaattcttcgacgaaagcaagaactggtatgagagtcaggcgtcttgtatgagtcagaatgccagcctgcttaaggtttattcaaaagaagaccaggatctgcttaagttggtaaagagctaccactggatggggctggtacatatcccaacgaatgggtcatggcagtgggaggacggttctattctgagtccaaatctcctgacgatcatcgaaatgcagaaaggggactgtgccctgtatgcatcatccttcaaggggtacatcgagaactgcagtaccccaaatacctacatttgtatgcaaagaacggtt

SEQ ID NO: 272 - protein, 139 aa, Artificial Sequence
  Synthesized
FLNSLFNQEVQIPLTESYCGPCPKNWICYKNNCYQFFDESKNWYESQASCMSQNASLLKVYSKEDQDLLKLVKSYHWMGLVHIPTNGSWQWEDGSILSPNLLTIIEMQKGDCALYASSFKGYIENCSTPNTYICMQRTV

SEQ ID NO: 273 - DNA, 1686 bp, Artificial Sequence
  Synthesized
cgagagggccccgagctgtctcctgatgacccagcaggcctcttggacttgcggcagggtatgttcgctcaacttgtggctcagaatgttctgctcattgatggaccactctcttggtatagtgaccccggtctggccggggtgagtctgaccggcgggctctcttataaagaggatactaaggaactggtcgtagcaaaagcgggcgtttattacgttttttttcagctggagctcaggcgcgtggtggccggcgagggcagtggctctgtgtccctggccctgcacttacagcccttgagaagcgctgcaggtgctgccgcactggctttaactgttgacctccctccggcctcttctgaagctagaaacagcgctttcggcttccaagggcgcctgctgcacctgagcgcaggccagcgcttaggtgtgcaccttcatacagaggccagggcccgacacgcttggcagctcacacagggtgccacggttctcggacttttccgcgttactcccgagatccccgctggcctcggaagtactggttctgggtctaaacccggttccggcgaaggtagtactaaaggacgagaagggccagagttaagtccagatgaccctgctgggcttttggacctgcggcagggcatgttcgctcaactggtggctcagaacgtgctgctgatcgatggccccctgagttggtacagcgatcccgggctggcaggcgtgtcacttacagggggcctctcttacaaggaagacaccaaggagttagtggtcgctaaggctggcgtgtattacgtgttcttccaactggagctgagaagggttgtggcaggagagggtagcggcagcgtgtctttagcccttcacttgcagcccctgaggtctgctgcaggtgcagccgctctcgcgctcaccgtggatctccccccagcctcatctgaagctaggaacagtgcatttggctttcagggacgcttgctgcacctctccgctggacagaggctgggcgtgcaccttcacacagaggcccgtgccaggcatgcatggcagctcactcagggggcaacagtgctgggtctcttccgcgtgactcctgaaataccagctggacttggcggtggaggcagcggcggaggaggatctcgtgaggggccagaactgtcccccgatgacccagccggactgctcgatctcagacagggcatgttcgctcagcttgtagcccaaaatgtcctcctgattgacggccctttgagctggtatagtgatcccggcttggccggggtatctctgaccggaggcctctcctacaaggaagacaccaaagagctggtggtggcaaaagcgggggtgtattatgtgttctttcagctcgagctgcggagagttgtggccggggaagggtctgggagcgtatctcttgcacttcacctgcagcccctgcgcagcgccgctggagccgccgcccttgctcttactgtggatctgcctcctgcttcctcagaagcacgcaacagcgccttcggctttcaaggacgtctcctgcacttgtccgcaggacagaggttgggcgtccatttacacactgaggcacgggcacggcacgcttggcagcttacccagggagccaccgtgctgggactctttagagtgacacccgagatccccgctggcttg

SEQ ID NO: 274 - protein, 562 aa, Artificial Sequence
  Synthesized
REGPELSPDDPAGLLDLRQGMFAQLVAQNVLLIDGPLSWYSDPGLAGVSLTGGLSYKEDTKELVVAKAGVYYVFFQLELRRVVAGEGSGSVSLALHLQPLRSAAGAAALALTVDLPPASSEARNSAFGFQGRLLHLSAGQRLGVHLHTEARARHAWQLTQGATVLGLFRVTPEIPAGLGSTGSGSKPGSGEGSTKGREGPELSPDDPAGLLDLRQGMFAQLVAQNVLLIDGPLSWYSDPGLAGVSLTGGLSYKEDTKELVVAKAGVYYVFFQLELRRVVAGEGSGSVSLALHLQPLRSAAGAAALALTVDLPPASSEARNSAFGFQGRLLHLSAGQRLGVHLHTEARARHAWQLTQGATVLGLFRVTPEIPAGLGGGGSGGGGSREGPELSPDDPAGLLDLRQGMFAQLVAQNVLLIDGPLSWYSDPGLAGVSLTGGLSYKEDTKELVVAKAGVYYVFFQLELRRVVAGEGSGSVSLALHLQPLRSAAGAAALALTVDLPPASSEARNSAFGFQGRLLHLSAGQRLGVHLHTEARARHAWQLTQGATVLGLFRVTPEIPAGL

SEQ ID NO: 275 - DNA, 3675 bp, Artificial Sequence
  Synthesized
gaaatcgtccttacacaatctcctagcacactgagtgtgagccccggcgaacgcgcgactttctcttgcagggcaagtcaatccatagggactaatatacattggtatcaacaaaagccaggtaaaccacccaggcttttgattaagtatgcaagtgagtctatttccggtatccctgaccgcttctctggatcaggcagtggcacagagttcacactcaccatatctagtgtgcaatcagaggacttcgccgtgtattactgccaacagaataataactggccgactaccttcggacccggtacaaagctgaccgttttaggcggtggcggtagtgggggaggcggttctggcggcggagggtccggcggtggaggatcacaagtacagttgcagcaatccggtcccggtctcgtcaaaccgagtgagacgcttagtataacgtgtactgtttcaggctttagccttacgaactatggagttcactggattcggcaggcacccggcaaaggtttggaatggctgggtgttatttggtcaggtggaaatacagactataacaccccctttacaagtcggttcacaattacgaaagataattccaaaaatcaagtttatttcaagttgagatccgtccgcgcggacgacactgcgatctactattgtgcgagggcactgacctactacgattacgaatttgcgtattgggggcaagggactcttgtaacagtctcgagcggcggtggagggtccggcggtggtggatcagaggtgcagctggtggagtctgggggaggcttggtccagcctggggggtccctgagactctcctgtgcagcctctggattcaccatcagtaccaatgcaatgagctgggtccgccaggctccagggaaggggctggagtggatcggagtcattactggtcgtgatatcacatactacgcgagctgggcgaaaggcagattcaccatctccagagacaattccaagaacacgctgtatcttcaaatgaacagcctgagagccgaggacacggctgtgtattactgtgcgagagacggtggttcttctgctattactagtaacaacatttggggccagggaaccctggtcaccgtgtcctcagctagcaccaagggcccatcggtcttccccctggcaccctcctccaagagcacctctgggggcacagcggccctgggctgcctggtcaaggactacttccccgaaccggtgacggtgtcgtggaactcaggcgccctgaccagcggcgtgcacaccttcccggctgtcctacagtcctcaggactctactccctcagcagcgtggtgaccgtgccctccagcagcttgggcacccagacctacatctgcaacgtgaatcacaagcccagcaacaccaaggtggacaagagagttgagcccaaatcttgtgacaaaactcacacatgcccaccgtgcccagcacctgaagccgcgggggcaccgtcagtcttcctcttccccccaaaacccaaggacaccctcatgatctcccggacccctgaggtcacatgcgtggtggtggacgtgagccacgaagaccctgaggtcaagttcaactggtacgtggacggcgtggaggtgcataatgccaagacaaagccgcgggaggagcagtacaacagcacgtaccgtgtggtcagcgtcctcaccgtcctgcaccaggactggctgaatggcaaggagtacaagtgcgcggtctccaacaaagccctcccagcccccatcgagaaaaccatctccaaagccaaagggcagccccgagaaccacaggtgtacaccctgcccccatcccgggatgagctgaccaagaaccaggtcagcctgacctgcctggtcaaaggcttctatcccagcgacatcgccgtggagtgggagagcaatgggcagccggagaacaactacaagaccacgcctcccgtgctggactccgacggctccttcttcctctatagcaagctcaccgtggacaagagcaggtggcagcaggggaacgtcttctcatgctccgtgatgcatgaggctctgcacaaccactacacgcagaagagcctctccctgtctccgggtggcggtggagggtccggcggtggtggatccgaggtgcagctgttggagtctgggggaggcttggtacagcctggggggtccctgagactctcctgtgcagcctctggattctccttcagtagcgggtacgacatgtgctgggtccgccaggctccagggaaggggctggagtggatcgcatgcattgctgctggtagtgctggtatcacttacgacgcgaactgggcgaaaggccggttcaccatctccagagacaattccaagaacacgctgtatctgcaaatgaacagcctgagagccgaggacacggccgtatattactgtgcgagatcggcgttttcgttcgactacgccatggacctctggggccagggaaccctggtcaccgtgtcgagcggtggaggcggatctggcggaggtggttccggcggtggcggctccggtggaggcggctctgacatccagatgacccagtctccttccaccctgtctgcatctgtaggagacagagtcaccatcacttgccaggccagtcagagcattagttcccacttaaactggtatcagcagaaaccagggaaagcccctaagctcctgatctataaggcatccactctggcatctggggtcccatcaaggttcagcggcagtggatctgggacagaatttactctcaccatcagcagcctgcagcctgatgattttgcaacttattactgccaacagggttatagttggggtaatgttgataatgttttcggcggagggaccaaggtggagatcaaaggcggtggagggtccggcggtggtggctccggacggtcgctggtggagtctgggggaggcttggtccagcctggggggtccctgagactctcctgtactgcctctggattcaccatcagtagctaccacatgcagtgggtccgccaggctccagggaaggggctggagtacatcggaaccattagtagtggtggtaatgtatactacgcaagctccgctagaggcagattcaccatctccagaccctcgtccaagaacacggtggatcttcaaatgaacagcctgagagccgaggacacggctgtgtattactgtgcgagagactctggttatagtgatcctatgtggggccagggaaccctggtcaccgtctcttcaggcggtggcggtagtgggggaggcggttctggcggcggagggtccggcggtggaggatcagacgttgtgatgacccagtctccatcttccgtgtctgcatctgtaggagacagagtcaccatcacctgtcaggccagtcagaacattaggacttacttatcctggtatcagcagaaaccagggaaagcccctaagctcctgatctatgctgcagccaatctggcatctggggtcccatcaaggttcagcggcagtggatctgggacagatttcactctcaccatcagcgacctggagcctggcgatgctgcaacttactattgtcagtctacctatcttggtactgattatgttggcggtgctttcggcggagggaccaaggtggagatcaaatga

SEQ ID NO: 276 - protein, 1224 aa, Artificial Sequence
  Synthesized
EIVLTQSPSTLSVSPGERATFSCRASQSIGTNIHWYQQKPGKPPRLLIKYASESISGIPDRFSGSGSGTEFTLTISSVQSEDFAVYYCQQNNNWPTTFGPGTKLTVLGGGGSGGGGSGGGGSGGGGSQVQLQQSGPGLVKPSETLSITCTVSGFSLTNYGVHWIRQAPGKGLEWLGVIWSGGNTDYNTPFTSRFTITKDNSKNQVYFKLRSVRADDTAIYYCARALTYYDYEFAYWGQGTLVTVSSGGGGSGGGGSEVQLVESGGGLVQPGGSLRLSCAASGFTISTNAMSWVRQAPGKGLEWIGVITGRDITYYASWAKGRFTISRDNSKNTLYLQMNSLRAEDTAVYYCARDGGSSAITSNNIWGQGTLVTVSSASTKGPSVFPLAPSSKSTSGGTAALGCLVKDYFPEPVTVSWNSGALTSGVHTFPAVLQSSGLYSLSSVVTVPSSSLGTQTYICNVNHKPSNTKVDKRVEPKSCDKTHTCPPCPAPEAAGAPSVFLFPPKPKDTLMISRTPEVTCVVVDVSHEDPEVKFNWYVDGVEVHNAKTKPREEQYNSTYRVVSVLTVLHQDWLNGKEYKCAVSNKALPAPIEKTISKAKGQPREPQVYTLPPSRDELTKNQVSLTCLVKGFYPSDIAVEWESNGQPENNYKTTPPVLDSDGSFFLYSKLTVDKSRWQQGNVFSCSVMHEALHNHYTQKSLSLSPGGGGGSGGGGSEVQLLESGGGLVQPGGSLRLSCAASGFSFSSGYDMCWVRQAPGKGLEWIACIAAGSAGITYDANWAKGRFTISRDNSKNTLYLQMNSLRAEDTAVYYCARSAFSFDYAMDLWGQGTLVTVSSGGGGSGGGGSGGGGSGGGGSDIQMTQSPSTLSASVGDRVTITCQASQSISSHLNWYQQKPGKAPKLLIYKASTLASGVPSRFSGSGSGTEFTLTISSLQPDDFATYYCQQGYSWGNVDNVFGGGTKVEIKGGGGSGGGGSGRSLVESGGGLVQPGGSLRLSCTASGFTISSYHMQWVRQAPGKGLEYIGTISSGGNVYYASSARGRFTISRPSSKNTVDLQMNSLRAEDTAVYYCARDSGYSDPMWGQGTLVTVSSGGGGSGGGGSGGGGSGGGGSDVVMTQSPSSVSASVGDRVTITCQASQNIRTYLSWYQQKPGKAPKLLIYAAANLASGVPSRFSGSGSGTDFTLTISDLEPGDAATYYCQSTYLGTDYVGGAFGGGTKVEIK

SEQ ID NO: 277 - DNA, 1428 bp, Artificial Sequence
  Synthesized
gaaaatgtattgacacagagccccgcctccctcagtgcctcacctggggaaagggtaactatcacttgctctgcatcaagcagcgtctcatacatgcattggtatcaacaaaagcctggacaggcccccaagctctggatatacgatacgagcaagctggcttccggcgtacctagccgcttcagtggttccggctcaggcaacgatcacacccttacgatttccagtatggaacccgaagattttgcaacttattattgtttccaggggagcgtgtacccattcactttcgggcaggggacaaaagtgacggtactgggtggaggcggttcaggcggaggtggttccggcggtggcggctccggtggaggcggctctcaggtcacattgaaggaatctggccccggccttgttcagccaggacagacccttaggctcacctgtgccttcagtggtttttctcttagcactagcggtatgggggtcggctggattcggcagcctcccggcaaaggtcttgagtggttggctcacatttggtgggacgacgacaaacggtataatcctgccttgaaaagtcggctgaccattagtaaggatacctcaaaaaatcaagtgtacttgcaaatgaatagccttgacgccgaggatacggctgtatattattgcgcgcggatggaactctggtcttactactttgattattgggggcaggggactctcgtcacggtctcgagcggcggtggagggtccggcggtggtggatcagacgtcgtgatgacccagtctccttccaccctgtctgcatctgtaggagacagagtcaccatcaattgccaagccagtgagagcattagcagttggttagcctggtatcagcagaaaccagggaaagcccctaagctcctgatctatgaagcatccaaactggcatctggggtcccatcaaggttcagcggcagtggatctgggacagaattcactctcaccatcagcagcctgcagcctgatgattttgcaacttattactgccaaggctatttttattttattagtcgtacttatgtaaattctttcggcggagggaccaaggtggagatcaaacgtacggtggctgcaccatctgtcttcatcttcccgccatctgatgagcagttgaaatctggaactgcctctgttgtgtgcctgctgaataacttctatcccagagaggccaaagtacagtggaaggtggataacgccctccaatcgggtaactcccaggagagtgtcacagagcaggacagcaaggacagcacctacagcctcagcagcaccctgacgctgagcaaagcagactacgagaaacacaaagtctacgcctgcgaagtcacccatcagggcctgagctcgcccgtcacaaagagcttcaacaggggagagtgttga

SEQ ID NO: 278 - protein, 475 aa, Artificial Sequence
  Synthesized
ENVLTQSPASLSASPGERVTITCSASSSVSYMHWYQQKPGQAPKLWIYDTSKLASGVPSRFSGSGSGNDHTLTISSMEPEDFATYYCFQGSVYPFTFGQGTKVTVLGGGGSGGGGSGGGGSGGGGSQVTLKESGPGLVQPGQTLRLTCAFSGFSLSTSGMGVGWIRQPPGKGLEWLAHIWWDDDKRYNPALKSRLTISKDTSKNQVYLQMNSLDAEDTAVYYCARMELWSYYFDYWGQGTLVTVSSGGGGSGGGGSDVVMTQSPSTLSASVGDRVTINCQASESISSWLAWYQQKPGKAPKLLIYEASKLASGVPSRFSGSGSGTEFTLTISSLQPDDFATYYCQGYFYFISRTYVNSFGGGTKVEIKRTVAAPSVFIFPPSDEQLKSGTASVVCLLNNFYPREAKVQWKVDNALQSGNSQESVTEQDSKDSTYSLSSTLTLSKADYEKHKVYACEVTHQGLSSPVTKSFNRGEC

SEQ ID NO: 279 - DNA, 4623 bp, Artificial Sequence
  Synthesized
gaaatcgtccttacacaatctcctagcacactgagtgtgagccccggcgaacgcgcgactttctcttgcagggcaagtcaatccatagggactaatatacattggtatcaacaaaagccaggtaaaccacccaggcttttgattaagtatgcaagtgagtctatttccggtatccctgaccgcttctctggatcaggcagtggcacagagttcacactcaccatatctagtgtgcaatcagaggacttcgccgtgtattactgccaacagaataataactggccgactaccttcggacccggtacaaagctgaccgttttaggcggtggcggtagtgggggaggcggttctggcggcggagggtccggcggtggaggatcacaagtacagttgcagcaatccggtcccggtctcgtcaaaccgagtgagacgcttagtataacgtgtactgtttcaggctttagccttacgaactatggagttcactggattcggcaggcacccggcaaaggtttggaatggctgggtgttatttggtcaggtggaaatacagactataacaccccctttacaagtcggttcacaattacgaaagataattccaaaaatcaagtttatttcaagttgagatccgtccgcgcggacgacactgcgatctactattgtgcgagggcactgacctactacgattacgaatttgcgtattgggggcaagggactcttgtaacagtctcgagcggcggtggagggtccggcggtggtggatcagaggtgcagctggtggagtctgggggaggcttggtccagcctggggggtccctgagactctcctgtgcagcctctggattcaccatcagtaccaatgcaatgagctgggtccgccaggctccagggaaggggctggagtggatcggagtcattactggtcgtgatatcacatactacgcgagctgggcgaaaggcagattcaccatctccagagacaattccaagaacacgctgtatcttcaaatgaacagcctgagagccgaggacacggctgtgtattactgtgcgagagacggtggttcttctgctattactagtaacaacatttggggccagggaaccctggtcaccgtgtcctcagctagcaccaagggcccatcggtcttccccctggcaccctcctccaagagcacctctgggggcacagcggccctgggctgcctggtcaaggactacttccccgaaccggtgacggtgtcgtggaactcaggcgccctgaccagcggcgtgcacaccttcccggctgtcctacagtcctcaggactctactccctcagcagcgtggtgaccgtgccctccagcagcttgggcacccagacctacatctgcaacgtgaatcacaagcccagcaacaccaaggtggacaagagagttgagcccaaatcttgtgacaaaactcacacatgcccaccgtgcccagcacctgaagccgcgggggcaccgtcagtcttcctcttccccccaaaacccaaggacaccctcatgatctcccggacccctgaggtcacatgcgtggtggtggacgtgagccacgaagaccctgaggtcaagttcaactggtacgtggacggcgtggaggtgcataatgccaagacaaagccgcgggaggagcagtacaacagcacgtaccgtgtggtcagcgtcctcaccgtcctgcaccaggactggctgaatggcaaggagtacaagtgcgcggtctccaacaaagccctcccagcccccatcgagaaaaccatctccaaagccaaagggcagccccgagaaccacaggtgtacaccctgcccccatcccgggatgagctgaccaagaaccaggtcagcctgacctgcctggtcaaaggcttctatcccagcgacatcgccgtggagtgggagagcaatgggcagccggagaacaactacaagaccacgcctcccgtgctggactccgacggctccttcttcctctatagcaagctcaccgtggacaagagcaggtggcagcaggggaacgtcttctcatgctccgtgatgcatgaggctctgcacaaccactacacgcagaagagcctctccctgtctccgggtggcggtggagggtccggcggtggtggatccgaggtgcagctgttggagtctgggggaggcttggtacagcctggggggtccctgagactctcctgtgcagcctctggattctccttcagtagcgggtacgacatgtgctgggtccgccaggctccagggaaggggctggagtggatcgcatgcattgctgctggtagtgctggtatcacttacgacgcgaactgggcgaaaggccggttcaccatctccagagacaattccaagaacacgctgtatctgcaaatgaacagcctgagagccgaggacacggccgtatattactgtgcgagatcggcgttttcgttcgactacgccatggacctctggggccagggaaccctggtcaccgtgtcgagcggtggaggcggatctggcggaggtggttccggcggtggcggctccggtggaggcggctctgacatccagatgacccagtctccttccaccctgtctgcatctgtaggagacagagtcaccatcacttgccaggccagtcagagcattagttcccacttaaactggtatcagcagaaaccagggaaagcccctaagctcctgatctataaggcatccactctggcatctggggtcccatcaaggttcagcggcagtggatctgggacagaatttactctcaccatcagcagcctgcagcctgatgattttgcaacttattactgccaacagggttatagttggggtaatgttgataatgttttcggcggagggaccaaggtggagatcaaaggcggtggagggtccggcggtggtggctccggacgagagggccccgagctgtctcctgatgacccagcaggcctcttggacttgcggcagggtatgttcgctcaacttgtggctcagaatgttctgctcattgatggaccactctcttggtatagtgaccccggtctggccggggtgagtctgaccggcgggctctcttataaagaggatactaaggaactggtcgtagcaaaagcgggcgtttattacgttttttttcagctggagctcaggcgcgtggtggccggcgagggcagtggctctgtgtccctggccctgcacttacagcccttgagaagcgctgcaggtgctgccgcactggctttaactgttgacctccctccggcctcttctgaagctagaaacagcgctttcggcttccaagggcgcctgctgcacctgagcgcaggccagcgcttaggtgtgcaccttcatacagaggccagggcccgacacgcttggcagctcacacagggtgccacggttctcggacttttccgcgttactcccgagatccccgctggcctcggaagtactggttctgggtctaaacccggttccggcgaaggtagtactaaaggacgagaagggccagagttaagtccagatgaccctgctgggcttttggacctgcggcagggcatgttcgctcaactggtggctcagaacgtgctgctgatcgatggccccctgagttggtacagcgatcccgggctggcaggcgtgtcacttacagggggcctctcttacaaggaagacaccaaggagttagtggtcgctaaggctggcgtgtattacgtgttcttccaactggagctgagaagggttgtggcaggagagggtagcggcagcgtgtctttagcccttcacttgcagcccctgaggtctgctgcaggtgcagccgctctcgcgctcaccgtggatctccccccagcctcatctgaagctaggaacagtgcatttggctttcagggacgcttgctgcacctctccgctggacagaggctgggcgtgcaccttcacacagaggcccgtgccaggcatgcatggcagctcactcagggggcaacagtgctgggtctcttccgcgtgactcctgaaataccagctggacttggcggtggaggcagcggcggaggaggatctcgtgaggggccagaactgtcccccgatgacccagccggactgctcgatctcagacagggcatgttcgctcagcttgtagcccaaaatgtcctcctgattgacggccctttgagctggtatagtgatcccggcttggccggggtatctctgaccggaggcctctcctacaaggaagacaccaaagagctggtggtggcaaaagcgggggtgtattatgtgttctttcagctcgagctgcggagagttgtggccggggaagggtctgggagcgtatctcttgcacttcacctgcagcccctgcgcagcgccgctggagccgccgcccttgctcttactgtggatctgcctcctgcttcctcagaagcacgcaacagcgccttcggctttcaaggacgtctcctgcacttgtccgcaggacagaggttgggcgtccatttacacactgaggcacgggcacggcacgcttggcagcttacccagggagccaccgtgctgggactctttagagtgacacccgagatccccgctggcttgtga

SEQ ID NO: 280 - protein, 1540 aa, Artificial Sequence
  Synthesized
EIVLTQSPSTLSVSPGERATFSCRASQSIGTNIHWYQQKPGKPPRLLIKYASESISGIPDRFSGSGSGTEFTLTISSVQSEDFAVYYCQQNNNWPTTFGPGTKLTVLGGGGSGGGGSGGGGSGGGGSQVQLQQSGPGLVKPSETLSITCTVSGFSLTNYGVHWIRQAPGKGLEWLGVIWSGGNTDYNTPFTSRFTITKDNSKNQVYFKLRSVRADDTAIYYCARALTYYDYEFAYWGQGTLVTVSSGGGGSGGGGSEVQLVESGGGLVQPGGSLRLSCAASGFTISTNAMSWVRQAPGKGLEWIGVITGRDITYYASWAKGRFTISRDNSKNTLYLQMNSLRAEDTAVYYCARDGGSSAITSNNIWGQGTLVTVSSASTKGPSVFPLAPSSKSTSGGTAALGCLVKDYFPEPVTVSWNSGALTSGVHTFPAVLQSSGLYSLSSVVTVPSSSLGTQTYICNVNHKPSNTKVDKRVEPKSCDKTHTCPPCPAPEAAGAPSVFLFPPKPKDTLMISRTPEVTCVVVDVSHEDPEVKFNWYVDGVEVHNAKTKPREEQYNSTYRVVSVLTVLHQDWLNGKEYKCAVSNKALPAPIEKTISKAKGQPREPQVYTLPPSRDELTKNQVSLTCLVKGFYPSDIAVEWESNGQPENNYKTTPPVLDSDGSFFLYSKLTVDKSRWQQGNVFSCSVMHEALHNHYTQKSLSLSPGGGGGSGGGGSEVQLLESGGGLVQPGGSLRLSCAASGFSFSSGYDMCWVRQAPGKGLEWIACIAAGSAGITYDANWAKGRFTISRDNSKNTLYLQMNSLRAEDTAVYYCARSAFSFDYAMDLWGQGTLVTVSSGGGGSGGGGSGGGGSGGGGSDIQMTQSPSTLSASVGDRVTITCQASQSISSHLNWYQQKPGKAPKLLIYKASTLASGVPSRFSGSGSGTEFTLTISSLQPDDFATYYCQQGYSWGNVDNVFGGGTKVEIKGGGGSGGGGSGREGPELSPDDPAGLLDLRQGMFAQLVAQNVLLIDGPLSWYSDPGLAGVSLTGGLSYKEDTKELVVAKAGVYYVFFQLELRRVVAGEGSGSVSLALHLQPLRSAAGAAALALTVDLPPASSEARNSAFGFQGRLLHLSAGQRLGVHLHTEARARHAWQLTQGATVLGLFRVTPEIPAGLGSTGSGSKPGSGEGSTKGREGPELSPDDPAGLLDLRQGMFAQLVAQNVLLIDGPLSWYSDPGLAGVSLTGGLSYKEDTKELVVAKAGVYYVFFQLELRRVVAGEGSGSVSLALHLQPLRSAAGAAALALTVDLPPASSEARNSAFGFQGRLLHLSAGQRLGVHLHTEARARHAWQLTQGATVLGLFRVTPEIPAGLGGGGSGGGGSREGPELSPDDPAGLLDLRQGMFAQLVAQNVLLIDGPLSWYSDPGLAGVSLTGGLSYKEDTKELVVAKAGVYYVFFQLELRRVVAGEGSGSVSLALHLQPLRSAAGAAALALTVDLPPASSEARNSAFGFQGRLLHLSAGQRLGVHLHTEARARHAWQLTQGATVLGLFRVTPEIPAGL

SEQ ID NO: 281 - DNA, 1428 bp, Artificial Sequence; identical to SEQ ID NO: 277
  Synthesized

SEQ ID NO: 282 - protein, 475 aa, Artificial Sequence; identical to SEQ ID NO: 278
  Synthesized

SEQ ID NO: 283 - DNA, 894 bp, Artificial Sequence
  Synthesized
tttcttaattcccttttcaaccaagaggttcagatccccttgactgaaagctattgcggcccttgtccgaaaaactggatatgttacaagaataattgttaccaattcttcgacgaaagcaagaactggtatgagagtcaggcgtcttgtatgagtcagaatgccagcctgcttaaggtttattcaaaagaagaccaggatctgcttaagttggtaaagagctaccactggatggggctggtacatatcccaacgaatgggtcatggcagtgggaggacggttctattctgagtccaaatctcctgacgatcatcgaaatgcagaaaggggactgtgccctgtatgcatcatccttcaaggggtacatcgagaactgcagtaccccaaatacctacatttgtatgcaaagaacggttggaggcggtggctcaggcggaggcggctcaggaggtggcggttcaggaggcggcggatctttcctaaactcattattcaaccaagaagttcaaattcccttgaccgaaagttactgtggcccatgtcctaaaaactggatatgttacaaaaataactgctaccaattttttgatgagagtaaaaactggtatgagagccaggcttcttgtatgtctcaaaatgccagccttctgaaagtatacagcaaagaggaccaggatttacttaaactggtgaagtcatatcattggatgggactagtacacattccaacaaatggatcttggcagtgggaagatggctccattctctcacccaacctactaacaataattgaaatgcagaagggagactgtgcactctatgcctcgagctttaaaggctatatagaaaactgttcaactccaaatacgtacatctgcatgcaaaggactgtg

SEQ ID NO: 284 - protein, 298 aa, Artificial Sequence
  Synthesized
FLNSLFNQEVQIPLTESYCGPCPKNWICYKNNCYQFFDESKNWYESQASCMSQNASLLKVYSKEDQDLLKLVKSYHWMGLVHIPTNGSWQWEDGSILSPNLLTIIEMQKGDCALYASSFKGYIENCSTPNTYICMQRTVGGGGSGGGGSGGGGSGGGGSFLNSLFNQEVQIPLTESYCGPCPKNWICYKNNCYQFFDESKNWYESQASCMSQNASLLKVYSKEDQDLLKLVKSYHWMGLVHIPTNGSWQWEDGSILSPNLLTIIEMQKGDCALYASSFKGYIENCSTPNTYICMQRTV

SEQ ID NO: 285 - DNA, 354 bp, Artificial Sequence
  Synthesized
gaggtgaagctggatgagactggaggaggcttggtgcaacctgggaggcccatgaaactctcctgtgttgcctctggattcacttttagtgactactggatgaactgggtccgccagtctccagagaaaggactggagtgggtagcacaaattagaaacaaaccttataattatgaaacatattattcagattctgtgaaaggcagattcaccatctcaagagatgattccaaaagtagtgtctacctgcaaatgaacaacttaagagttgaagacatgggtatctattactgtacgggttcttactatggtatggactactggggtcaaggaacctcagtcaccgtctcctca

SEQ ID NO: 286 - protein, 118 aa, Artificial Sequence
  Synthesized
EVKLDETGGGLVQPGRPMKLSCVASGFTFSDYWMNWVRQSPEKGLEWVAQIRNKPYNYETYYSDSVKGRFTISRDDSKSSVYLQMNNLRVEDMGIYYCTGSYYGMDYWGQGTSVTVSS

SEQ ID NO: 287 - DNA, 336 bp, Artificial Sequence
  Synthesized
gatgtcgtgatgacccaaactccactctccctgcctgtcagtcttggagatcaagcctccatctcttgcagatctagtcagagccttgtacacagtaatggaaacacctatttacgttggtacctgcagaagccaggccagtctccaaaggtcctgatctacaaagtttccaaccgattttctggggtcccagacaggttcagtggcagtggatcagggacagatttcacactcaagatcagcagagtggaggctgaggatctgggagtttatttctgctctcaaagtacacatgttccgtggacgttcggtggaggcaccaagctggaaatcaaa

SEQ ID NO: 288 - protein, 112 aa, Artificial Sequence
  Synthesized
DVVMTQTPLSLPVSLGDQASISCRSSQSLVHSNGNTYLRWYLQKPGQSPKVLIYKVSNRFSGVPDRFSGSGSGTDFTLKISRVEAEDLGVYFCSQSTHVPWTFGGGTKLEIK

SEQ ID NO: 289 - DNA, 360 bp, Artificial Sequence
  Synthesized
gaggtgcagctggtggagagcggcggcggcctggtgcagcccggcggcagcctgaggctgagctgcaccgccagcggcttcaccatcagcaccaacgccatgagctgggtgaggcaggcccccggcaagggcctggagtgggtgggcgtgatcaccggcagggacatcacctactacgccagctgggccaagggcaggttcaccatcagcagggacaccagcaagaacaccgtgtacctgcagatgaacagcctgagggccgaggacaccgccgtgtactactgcgccagggacggcggcagcagcgccatcaccagcaacaacatctggggccagggcaccctggtgaccgtgagcagc

SEQ ID NO: 290 - protein, 120 aa, Artificial Sequence
  Synthesized
EVQLVESGGGLVQPGGSLRLSCTASGFTISTNAMSWVRQAPGKGLEWVGVITGRDITYYASWAKGRFTISRDTSKNTVYLQMNSLRAEDTAVYYCARDGGSSAITSNNIWGQGTLVTVSS

SEQ ID NO: 291 - DNA, 336 bp, Artificial Sequence
  Synthesized
gagatcgtgatgacccagagccccagcaccctgagcgccagcgtgggcgacagggtgatcatcacctgccaggccagcgagagcatcagcagctggctggcctggtaccagcagaagcccggcaaggcccccaagctgctgatctacgaggccagcaagctggccagcggcgtgcccagcaggttcagcggcagcggcagcggcgccgagttcaccctgaccatcagcagcctgcagcccgacgacttcgccacctactactgccagggctacttctacttcatcagcaggacctacgtgaacagcttcggccagggcaccaagctgaccgtgctg

SEQ ID NO: 292 - protein, 112 aa, Artificial Sequence
  Synthesized
EIVMTQSPSTLSASVGDRVIITCQASESISSWLAWYQQKPGKAPKLLIYEASKLASGVPSRFSGSGSGAEFTLTISSLQPDDFATYYCQGYFYFISRTYVNSFGQGTKLTVL

SEQ ID NO: 293 - DNA, 357 bp, Artificial Sequence
  Synthesized
caagtacagttgcagcaatccggtcccggtctcgtcaaaccgagtgagacgcttagtataacgtgtactgtttcaggctttagccttacgaactatggagttcactggattcggcaggcacccggcaaaggtttggaatggctgggtgttatttggtcaggtggaaatacagactataacaccccctttacaagtcggttcacaattacgaaagataattccaaaaatcaagtttatttcaagttgagatccgtccgcgcggacgacactgcgatctactattgtgcgagggcactgacctactacgattacgaatttgcgtattgggggcaagggactcttgtaacagtctcgagc

SEQ ID NO: 294 - protein, 119 aa, Artificial Sequence
  Synthesized
QVQLQQSGPGLVKPSETLSITCTVSGFSLTNYGVHWIRQAPGKGLEWLGVIWSGGNTDYNTPFTSRFTITKDNSKNQVYFKLRSVRADDTAIYYCARALTYYDYEFAYWGQGTLVTVSS

SEQ ID NO: 295 - DNA, 321 bp, Artificial Sequence
  Synthesized
gaaatcgtccttacacaatctcctagcacactgagtgtgagccccggcgaacgcgcgactttctcttgcagggcaagtcaatccatagggactaatatacattggtatcaacaaaagccaggtaaaccacccaggcttttgattaagtatgcaagtgagtctatttccggtatccctgaccgcttctctggatcaggcagtggcacagagttcacactcaccatatctagtgtgcaatcagaggacttcgccgtgtattactgccaacagaataataactggccgactaccttcggacccggtacaaagctgaccgtttta

SEQ ID NO: 296 - protein, 107 aa, Artificial Sequence
  Synthesized
EIVLTQSPSTLSVSPGERATFSCRASQSIGTNIHWYQQKPGKPPRLLIKYASESISGIPDRFSGSGSGTEFTLTISSVQSEDFAVYYCQQNNNWPTTFGPGTKLTVL

SEQ ID NO: 297 - DNA, 3690 bp, Artificial Sequence
  Synthesized
gaaatcgttatgacgcagagtccctccacgctctccgctagtgtcggggatcgcgtcattatcacatgccaggcctccgagtcaatcagcagctggcttgcatggtatcaacagaagccgggaaaagctcctaaattgctgatctatgaagcgtcaaaattggcgtctggtgtcccatctaggttctccggctctgggtctggtgcggaatttactttgacaatctccagtcttcaaccagacgatttcgctacctactactgccaagggtatttctattttataagccggacatatgtaaactccttcggccaaggaacaaagttgactgttcttggtggcggaggcagtggtggcgggggcagcggaggtggtggttcagggggtggtgggagcgaagtccaattggtagaaagtggcggtggtctggtgcaacctggtggatctcttcgcctctcatgcgccgctagtggctttactatttcaactaatgcgatgagctgggttcgccaggcccccggcaaaggacttgagtgggtcggcgtcatcaccggcagggacattacatactatgcgagttgggcaaagggcaggttcacgattagccgcgatacttcaaagaataccgtttaccttcaaatgaatagcttgagggcggaagacacagctgtgtattactgcgcgagggatggaggtagttccgccataacttccaacaacatatggggacaaggcacgctggttactgtctcgagtggcggtggagggtccggcggtggtggatcacaagtacagttgcagcaatccggtcccggtctcgtcaaaccgagtgagacgcttagtataacgtgtactgtttcaggctttagccttacgaactatggagttcactggattcggcaggcacccggcaaatgtttggaatggctgggtgttatttggtcaggtggaaatacagactataacaccccctttacaagtcggttcacaattacgaaagataattccaaaaatcaagtttatttcaagttgagatccgtccgcgcggacgacactgcgatctactattgtgcgagggcactgacctactacgattacgaatttgcgtattgggggcaagggactcttgtaacagtctccagtgctagcaccaagggcccatcggtcttccccctggcaccctcctccaagagcacctctgggggcacagcggccctgggctgcctggtcaaggactacttccccgaaccggtgacggtgtcgtggaactcaggcgccctgaccagcggcgtgcacaccttcccggctgtcctacagtcctcaggactctactccctcagcagcgtggtgaccgtgccctccagcagcttgggcacccagacctacatctgcaacgtgaatcacaagcccagcaacaccaaggtggacaagagagttgagcccaaatcttgtgacaaaactcacacatgcccaccgtgcccagcacctgaagccgcgggggcaccgtcagtcttcctcttccccccaaaacccaaggacaccctcatgatctcccggacccctgaggtcacatgcgtggtggtggacgtgagccacgaagaccctgaggtcaagttcaactggtacgtggacggcgtggaggtgcataatgccaagacaaagccgcgggaggagcagtacaacagcacgtaccgtgtggtcagcgtcctcaccgtcctgcaccaggactggctgaatggcaaggagtacaagtgcgcggtctccaacaaagccctcccagcccccatcgagaaaaccatctccaaagccaaagggcagccccgagaaccacaggtgtacaccctgcccccatcccgggatgagctgaccaagaaccaggtcagcctgacctgcctggtcaaaggcttctatcccagcgacatcgccgtggagtgggagagcaatgggcagccggagaacaactacaagaccacgcctcccgtgctggactccgacggctccttcttcctctatagcaagctcaccgtggacaagagcaggtggcagcaggggaacgtcttctcatgctccgtgatgcatgaggctctgcacaaccactacacgcagaagagcctctccctgtctccgggtggcggtggagggtccggcggtggtggatccgaggtgcagctgttggagtctgggggaggcttggtacagcctggggggtccctgagactctcctgtgcagcctctggattctccttcagtagcgggtacgacatgtgctgggtccgccaggctccagggaaggggctggagtggatcgcatgcattgctgctggtagtgctggtatcacttacgacgcgaactgggcgaaaggccggttcaccatctccagagacaattccaagaacacgctgtatctgcaaatgaacagcctgagagccgaggacacggccgtatattactgtgcgagatcggcgttttcgttcgactacgccatggacctctggggccagggaaccctggtcaccgtgtcgagcggtggaggcggatctggcggaggtggttccggcggtggcggctccggtggaggcggctctgacatccagatgacccagtctccttccaccctgtctgcatctgtaggagacagagtcaccatcacttgccaggccagtcagagcattagttcccacttaaactggtatcagcagaaaccagggaaagcccctaagctcctgatctataaggcatccactctggcatctggggtcccatcaaggttcagcggcagtggatctgggacagaatttactctcaccatcagcagcctgcagcctgatgattttgcaacttattactgccaacagggttatagttggggtaatgttgataatgttttcggcggagggaccaaggtggagatcaaaggcggtggagggtccggcggtggtggctccggacggtcgctggtggagtctgggggaggcttggtccagcctggggggtccctgagactctcctgtactgcctctggattcaccatcagtagctaccacatgcagtgggtccgccaggctccagggaaggggctggagtacatcggaaccattagtagtggtggtaatgtatactacgcaagctccgctagaggcagattcaccatctccagaccctcgtccaagaacacggtggatcttcaaatgaacagcctgagagccgaggacacggctgtgtattactgtgcgagagactctggttatagtgatcctatgtggggccagggaaccctggtcaccgtctcttcaggcggtggcggtagtgggggaggcggttctggcggcggagggtccggcggtggaggatcagacgttgtgatgacccagtctccatcttccgtgtctgcatctgtaggagacagagtcaccatcacctgtcaggccagtcagaacattaggacttacttatcctggtatcagcagaaaccagggaaagcccctaagctcctgatctatgctgcagccaatctggcatctggggtcccatcaaggttcagcggcagtggatctgggacagatttcactctcaccatcagcgacctggagcctggcgatgctgcaacttactattgtcagtctacctatcttggtactgattatgttggcggtgctttcggcggagggaccaaggtggagatcaaatga

SEQ ID NO: 298 - protein, 1229 aa, Artificial Sequence
  Synthesized
EIVMTQSPSTLSASVGDRVIITCQASESISSWLAWYQQKPGKAPKLLIYEASKLASGVPSRFSGSGSGAEFTLTISSLQPDDFATYYCQGYFYFISRTYVNSFGQGTKLTVLGGGGSGGGGSGGGGSGGGGSEVQLVESGGGLVQPGGSLRLSCAASGFTISTNAMSWVRQAPGKGLEWVGVITGRDITYYASWAKGRFTISRDTSKNTVYLQMNSLRAEDTAVYYCARDGGSSAITSNNIWGQGTLVTVSSGGGGSGGGGSQVQLQQSGPGLVKPSETLSITCTVSGFSLTNYGVHWIRQAPGKCLEWLGVIWSGGNTDYNTPFTSRFTITKDNSKNQVYFKLRSVRADDTAIYYCARALTYYDYEFAYWGQGTLVTVSSASTKGPSVFPLAPSSKSTSGGTAALGCLVKDYFPEPVTVSWNSGALTSGVHTFPAVLQSSGLYSLSSVVTVPSSSLGTQTYICNVNHKPSNTKVDKRVEPKSCDKTHTCPPCPAPEAAGAPSVFLFPPKPKDTLMISRTPEVTCVVVDVSHEDPEVKFNWYVDGVEVHNAKTKPREEQYNSTYRVVSVLTVLHQDWLNGKEYKCAVSNKALPAPIEKTISKAKGQPREPQVYTLPPSRDELTKNQVSLTCLVKGFYPSDIAVEWESNGQPENNYKTTPPVLDSDGSFFLYSKLTVDKSRWQQGNVFSCSVMHEALHNHYTQKSLSLSPGGGGGSGGGGSEVQLLESGGGLVQPGGSLRLSCAASGFSFSSGYDMCWVRQAPGKGLEWIACIAAGSAGITYDANWAKGRFTISRDNSKNTLYLQMNSLRAEDTAVYYCARSAFSFDYAMDLWGQGTLVTVSSGGGGSGGGGSGGGGSGGGGSDIQMTQSPSTLSASVGDRVTITCQASQSISSHLNWYQQKPGKAPKLLIYKASTLASGVPSRFSGSGSGTEFTLTISSLQPDDFATYYCQQGYSWGNVDNVFGGGTKVEIKGGGGSGGGGSGRSLVESGGGLVQPGGSLRLSCTASGFTISSYHMQWVRQAPGKGLEYIGTISSGGNVYYASSARGRFTISRPSSKNTVDLQMNSLRAEDTAVYYCARDSGYSDPMWGQGTLVTVSSGGGGSGGGGSGGGGSGGGGSDVVMTQSPSSVSASVGDRVTITCQASQNIRTYLSWYQQKPGKAPKLLIYAAANLASGVPSRFSGSGSGTDFTLTISDLEPGDAATYYCQSTYLGTDYVGGAFGGGTKVEIK

SEQ ID NO: 299 - DNA, 2205 bp, Artificial Sequence
  Synthesized
gaaaatgtattgacacagagccccgcctccctcagtgcctcacctggggaaagggtaactatcacttgctctgcatcaagcagcgtctcatacatgcattggtatcaacaaaagcctggacaggcccccaagctctggatatacgatacgagcaagctggcttccggcgtacctagccgcttcagtggttccggctcaggcaacgatcacacccttacgatttccagtatggaacccgaagattttgcaacttattattgtttccaggggagcgtgtacccattcactttcgggcaggggacaaaagtgaccgtcctaggcggtggcggtagtgggggaggcggttctggcggcggagggtccggcggtggaggatcacaggtcacattgaaggaatctggccccggccttgttcagccaggacagacccttagcctcacctgtgccttcagtggtttttctcttagcactagcggtatgggggtcggctggattcggcagcctcccggcaaaggtcttgagtggttggctcacatttggtgggacgacgacaaacggtataatcctgccttgaaaagtcggctgaccattagtaaggatacctcaaaaaatcaagtgtacttgcaaatgaatagccttgacgccgaggatacggctgtatattattgcgctcggatggaactctggtcttactactttgattattgggggcaggggactctcgtcacggtctcgagtggcggtggagggtccggcggtggtggatcagaaatcgtccttacacaatctcctagcacactgagtgtgagccccggcgaacgcgcgactttctcttgcagggcaagtcaatccatagggactaatatacattggtatcaacaaaagccaggtaaaccacccaggcttttgattaagtatgcaagtgagtctatttccggtatccctgaccgcttctctggatcaggcagtggcacagagttcacactcaccatatctagtgtgcaatcagaggacttcgccgtgtattactgccaacagaataataactggccgactaccttcggatgcggtacaaagctgaccgttttacgtacggtggctgcaccatctgtcttcatcttcccgccatctgatgagcagttgaaatctggaactgcctctgttgtgtgcctgctgaataacttctatcccagagaggccaaagtacagtggaaggtggataacgccctccaatcgggtaactcccaggagagtgtcacagagcaggacagcaaggacagcacctacagcctcagcagcaccctgacgctgagcaaagcagactacgagaaacacaaagtctacgcctgcgaagtcacccatcagggcctgagctcgcccgtcacaaagagcttcaacaggggagagtgtggcggtggcggtagcggtggcggcggaagtggtggcggaggatcccagtctgccctgactcagcctgcctccgtgtctgggtctcctggacagtcgatcaccatctcctgcactggaaccagcagtgacgttggtggttataactttgtctcctggtaccaacaacacccaggcaaagcccccaaactcatgatctatgatgtcagtgatcggccctcaggggtgtctgatcgcttctccggctccaagtctggcaacacggcctccctgatcatctctggcctccaggctgacgacgaggctgattattactgcagctcatatgggagcagcagcactcatgtgattttcggcggagggaccaaggtgaccgtcctaggtggaggcggttcaggcggaggtggttccggcggtggcggctccggtggaggcggctctcaggtgcaattgcaggagtcggggggaggcctggtcaagcctggagggtccctgagtctctcctgtgcagcctctggattcacctttagtagttattggatgagctgggtccgccaggctccagggaaggggctggagtgggtggccaacataaaccgcgatggaagtgcgagttactatgtggactctgtgaagggccgattcaccatctccagagacgacgccaagaactcactgtatctgcaaatgaacagcctgagagctgaggacacggctgtgtattactgtgcgagagatcgtggggtgggctacttcgatctctggggccgtggcaccctggtcaccgtctctagctga

SEQ ID NO: 300 - protein, 734 aa, Artificial Sequence
  Synthesized
ENVLTQSPASLSASPGERVTITCSASSSVSYMHWYQQKPGQAPKLWIYDTSKLASGVPSRFSGSGSGNDHTLTISSMEPEDFATYYCFQGSVYPFTFGQGTKVTVLGGGGSGGGGSGGGGSGGGGSQVTLKESGPGLVQPGQTLSLTCAFSGFSLSTSGMGVGWIRQPPGKGLEWLAHIWWDDDKRYNPALKSRLTISKDTSKNQVYLQMNSLDAEDTAVYYCARMELWSYYFDYWGQGTLVTVSSGGGGSGGGGSEIVLTQSPSTLSVSPGERATFSCRASQSIGTNIHWYQQKPGKPPRLLIKYASESISGIPDRFSGSGSGTEFTLTISSVQSEDFAVYYCQQNNNWPTTFGCGTKLTVLRTVAAPSVFIFPPSDEQLKSGTASVVCLLNNFYPREAKVQWKVDNALQSGNSQESVTEQDSKDSTYSLSSTLTLSKADYEKHKVYACEVTHQGLSSPVTKSFNRGECGGGGSGGGGSGGGGSQSALTQPASVSGSPGQSITISCTGTSSDVGGYNFVSWYQQHPGKAPKLMIYDVSDRPSGVSDRFSGSKSGNTASLIISGLQADDEADYYCSSYGSSSTHVIFGGGTKVTVLGGGGSGGGGSGGGGSGGGGSQVQLQESGGGLVKPGGSLSLSCAASGFTFSSYWMSWVRQAPGKGLEWVANINRDGSASYYVDSVKGRFTISRDDAKNSLYLQMNSLRAEDTAVYYCARDRGVGYFDLWGRGTLVTVSS

SEQ ID NO: 301 - DNA, 3690 bp, Artificial Sequence
  Synthesized
gaaatcgttatgacgcagagtccctccacgctctccgctagtgtcggggatcgcgtcattatcacatgccaggcctccgagtcaatcagcagctggcttgcatggtatcaacagaagccgggaaaagctcctaaattgctgatctatgaagcgtcaaaattggcgtctggtgtcccatctaggttctccggctctgggtctggtgcggaatttactttgacaatctccagtcttcaaccagacgatttcgctacctactactgccaagggtatttctattttataagccggacatatgtaaactccttcggccaaggaacaaagttgactgttcttggtggcggaggcagtggtggcgggggcagcggaggtggtggttcagggggtggtgggagcgaagtccaattggtagaaagtggcggtggtctggtgcaacctggtggatctcttcgcctctcatgcgccgctagtggctttactatttcaactaatgcgatgagctgggttcgccaggcccccggcaaaggacttgagtgggtcggcgtcatcaccggcagggacattacatactatgcgagttgggcaaagggcaggttcacgattagccgcgatacttcaaagaataccgtttaccttcaaatgaatagcttgagggcggaagacacagctgtgtattactgcgcgagggatggaggtagttccgccataacttccaacaacatatggggacaaggcacgctggttactgtctcgagtggcggtggagggtccggcggtggtggatcacaggtgcagctgaagcagtcaggacctggcctagtgcagccctcacagagcctgtccatcacctgcacagtctctggtttctcattaactaactatggtgtacactgggttcgccagtctccaggaaagtgtctggagtggctgggagtgatatggagtggtggaaacacagactataatacacctttcacatccagactgagcatcaacaaggacaattccaagagccaagttttctttaaaatgaacagtctgcaatctaatgacacagccatatattactgtgccagagccctcacctactatgattacgagtttgcttactggggccaagggactctggtcactgtctcgagtgctagcaccaagggcccatcggtcttccccctggcaccctcctccaagagcacctctgggggcacagcggccctgggctgcctggtcaaggactacttccccgaaccggtgacggtgtcgtggaactcaggcgccctgaccagcggcgtgcacaccttcccggctgtcctacagtcctcaggactctactccctcagcagcgtggtgaccgtgccctccagcagcttgggcacccagacctacatctgcaacgtgaatcacaagcccagcaacaccaaggtggacaagagagttgagcccaaatcttgtgacaaaactcacacatgcccaccgtgcccagcacctgaagccgcgggggcaccgtcagtcttcctcttccccccaaaacccaaggacaccctcatgatctcccggacccctgaggtcacatgcgtggtggtggacgtgagccacgaagaccctgaggtcaagttcaactggtacgtggacggcgtggaggtgcataatgccaagacaaagccgcgggaggagcagtacaacagcacgtaccgtgtggtcagcgtcctcaccgtcctgcaccaggactggctgaatggcaaggagtacaagtgcgcggtctccaacaaagccctcccagcccccatcgagaaaaccatctccaaagccaaagggcagccccgagaaccacaggtgtacaccctgcccccatcccgggatgagctgaccaagaaccaggtcagcctgacctgcctggtcaaaggcttctatcccagcgacatcgccgtggagtgggagagcaatgggcagccggagaacaactacaagaccacgcctcccgtgctggactccgacggctccttcttcctctatagcaagctcaccgtggacaagagcaggtggcagcaggggaacgtcttctcatgctccgtgatgcatgaggctctgcacaaccactacacgcagaagagcctctccctgtctccgggtggcggtggagggtccggcggtggtggatccgaggtgcagctgttggagtctgggggaggcttggtacagcctggggggtccctgagactctcctgtgcagcctctggattctccttcagtagcgggtacgacatgtgctgggtccgccaggctccagggaaggggctggagtggatcgcatgcattgctgctggtagtgctggtatcacttacgacgcgaactgggcgaaaggccggttcaccatctccagagacaattccaagaacacgctgtatctgcaaatgaacagcctgagagccgaggacacggccgtatattactgtgcgagatcggcgttttcgttcgactacgccatggacctctggggccagggaaccctggtcaccgtgtcgagcggtggaggcggatctggcggaggtggttccggcggtggcggctccggtggaggcggctctgacatccagatgacccagtctccttccaccctgtctgcatctgtaggagacagagtcaccatcacttgccaggccagtcagagcattagttcccacttaaactggtatcagcagaaaccagggaaagcccctaagctcctgatctataaggcatccactctggcatctggggtcccatcaaggttcagcggcagtggatctgggacagaatttactctcaccatcagcagcctgcagcctgatgattttgcaacttattactgccaacagggttatagttggggtaatgttgataatgttttcggcggagggaccaaggtggagatcaaaggcggtggagggtccggcggtggtggctccggacggtcgctggtggagtctgggggaggcttggtccagcctggggggtccctgagactctcctgtactgcctctggattcaccatcagtagctaccacatgcagtgggtccgccaggctccagggaaggggctggagtacatcggaaccattagtagtggtggtaatgtatactacgcaagctccgctagaggcagattcaccatctccagaccctcgtccaagaacacggtggatcttcaaatgaacagcctgagagccgaggacacggctgtgtattactgtgcgagagactctggttatagtgatcctatgtggggccagggaaccctggtcaccgtctcttcaggcggtggcggtagtgggggaggcggttctggcggcggagggtccggcggtggaggatcagacgttgtgatgacccagtctccatcttccgtgtctgcatctgtaggagacagagtcaccatcacctgtcaggccagtcagaacattaggacttacttatcctggtatcagcagaaaccagggaaagcccctaagctcctgatctatgctgcagccaatctggcatctggggtcccatcaaggttcagcggcagtggatctgggacagatttcactctcaccatcagcgacctggagcctggcgatgctgcaacttactattgtcagtctacctatcttggtactgattatgttggcggtgctttcggcggagggaccaaggtggagatcaaatga

SEQ ID NO: 302 - protein, 1229 aa, Artificial Sequence
  Synthesized
EIVMTQSPSTLSASVGDRVIITCQASESISSWLAWYQQKPGKAPKLLIYEASKLASGVPSRFSGSGSGAEFTLTISSLQPDDFATYYCQGYFYFISRTYVNSFGQGTKLTVLGGGGSGGGGSGGGGSGGGGSEVQLVESGGGLVQPGGSLRLSCAASGFTISTNAMSWVRQAPGKGLEWVGVITGRDITYYASWAKGRFTISRDTSKNTVYLQMNSLRAEDTAVYYCARDGGSSAITSNNIWGQGTLVTVSSGGGGSGGGGSQVQLKQSGPGLVQPSQSLSITCTVSGFSLTNYGVHWVRQSPGKCLEWLGVIWSGGNTDYNTPFTSRLSINKDNSKSQVFFKMNSLQSNDTAIYYCARALTYYDYEFAYWGQGTLVTVSSASTKGPSVFPLAPSSKSTSGGTAALGCLVKDYFPEPVTVSWNSGALTSGVHTFPAVLQSSGLYSLSSVVTVPSSSLGTQTYICNVNHKPSNTKVDKRVEPKSCDKTHTCPPCPAPEAAGAPSVFLFPPKPKDTLMISRTPEVTCVVVDVSHEDPEVKFNWYVDGVEVHNAKTKPREEQYNSTYRVVSVLTVLHQDWLNGKEYKCAVSNKALPAPIEKTISKAKGQPREPQVYTLPPSRDELTKNQVSLTCLVKGFYPSDIAVEWESNGQPENNYKTTPPVLDSDGSFFLYSKLTVDKSRWQQGNVFSCSVMHEALHNHYTQKSLSLSPGGGGGSGGGGSEVQLLESGGGLVQPGGSLRLSCAASGFSFSSGYDMCWVRQAPGKGLEWIACIAAGSAGITYDANWAKGRFTISRDNSKNTLYLQMNSLRAEDTAVYYCARSAFSFDYAMDLWGQGTLVTVSSGGGGSGGGGSGGGGSGGGGSDIQMTQSPSTLSASVGDRVTITCQASQSISSHLNWYQQKPGKAPKLLIYKASTLASGVPSRFSGSGSGTEFTLTISSLQPDDFATYYCQQGYSWGNVDNVFGGGTKVEIKGGGGSGGGGSGRSLVESGGGLVQPGGSLRLSCTASGFTISSYHMQWVRQAPGKGLEYIGTISSGGNVYYASSARGRFTISRPSSKNTVDLQMNSLRAEDTAVYYCARDSGYSDPMWGQGTLVTVSSGGGGSGGGGSGGGGSGGGGSDVVMTQSPSSVSASVGDRVTITCQASQNIRTYLSWYQQKPGKAPKLLIYAAANLASGVPSRFSGSGSGTDFTLTISDLEPGDAATYYCQSTYLGTDYVGGAFGGGTKVEIK

SEQ ID NO: 303 - DNA, 2205 bp, Artificial Sequence
  Synthesized
gaaaatgtattgacacagagccccgcctccctcagtgcctcacctggggaaagggtaactatcacttgctctgcatcaagcagcgtctcatacatgcattggtatcaacaaaagcctggacaggcccccaagctctggatatacgatacgagcaagctggcttccggcgtacctagccgcttcagtggttccggctcaggcaacgatcacacccttacgatttccagtatggaacccgaagattttgcaacttattattgtttccaggggagcgtgtacccattcactttcgggcaggggacaaaagtgaccgtcctaggcggtggcggtagtgggggaggcggttctggcggcggagggtccggcggtggaggatcacaggtcacattgaaggaatctggccccggccttgttcagccaggacagacccttagcctcacctgtgccttcagtggtttttctcttagcactagcggtatgggggtcggctggattcggcagcctcccggcaaaggtcttgagtggttggctcacatttggtgggacgacgacaaacggtataatcctgccttgaaaagtcggctgaccattagtaaggatacctcaaaaaatcaagtgtacttgcaaatgaatagccttgacgccgaggatacggctgtatattattgcgctcggatggaactctggtcttactactttgattattgggggcaggggactctcgtcacggtctcgagtggcggtggagggtccggcggtggtggatcagacatcttgctgactcagtctccagtcatcctgtctgtgagtccaggagaaagagtcagtttctcctgcagggccagtcagagtattggcacaaacatacactggtatcagcaaagaacaaatggttctccaaggcttctcataaagtatgcttctgagtctatctctgggattccttccaggtttagtggcagtggatcagggacagattttactcttagcatcaacagtgtggagtctgaagatattgcagattattactgtcaacaaaataataactggccaaccacgttcggttgtgggaccaagctggagctgaaacgtacggtggctgcaccatctgtcttcatcttcccgccatctgatgagcagttgaaatctggaactgcctctgttgtgtgcctgctgaataacttctatcccagagaggccaaagtacagtggaaggtggataacgccctccaatcgggtaactcccaggagagtgtcacagagcaggacagcaaggacagcacctacagcctcagcagcaccctgacgctgagcaaagcagactacgagaaacacaaagtctacgcctgcgaagtcacccatcagggcctgagctcgcccgtcacaaagagcttcaacaggggagagtgtggcggtggcggtagcggtggcggcggaagtggtggcggaggatcccagtctgccctgactcagcctgcctccgtgtctgggtctcctggacagtcgatcaccatctcctgcactggaaccagcagtgacgttggtggttataactttgtctcctggtaccaacaacacccaggcaaagcccccaaactcatgatctatgatgtcagtgatcggccctcaggggtgtctgatcgcttctccggctccaagtctggcaacacggcctccctgatcatctctggcctccaggctgacgacgaggctgattattactgcagctcatatgggagcagcagcactcatgtgattttcggcggagggaccaaggtgaccgtcctaggtggaggcggttcaggcggaggtggttccggcggtggcggctccggtggaggcggctctcaggtgcaattgcaggagtcggggggaggcctggtcaagcctggagggtccctgagtctctcctgtgcagcctctggattcacctttagtagttattggatgagctgggtccgccaggctccagggaaggggctggagtgggtggccaacataaaccgcgatggaagtgcgagttactatgtggactctgtgaagggccgattcaccatctccagagacgacgccaagaactcactgtatctgcaaatgaacagcctgagagctgaggacacggctgtgtattactgtgcgagagatcgtggggtgggctacttcgatctctggggccgtggcaccctggtcaccgtctctagctga

SEQ ID NO: 304 - protein, 734 aa, Artificial Sequence
  Synthesized
ENVLTQSPASLSASPGERVTITCSASSSVSYMHWYQQKPGQAPKLWIYDTSKLASGVPSRFSGSGSGNDHTLTISSMEPEDFATYYCFQGSVYPFTFGQGTKVTVLGGGGSGGGGSGGGGSGGGGSQVTLKESGPGLVQPGQTLSLTCAFSGFSLSTSGMGVGWIRQPPGKGLEWLAHIWWDDDKRYNPALKSRLTISKDTSKNQVYLQMNSLDAEDTAVYYCARMELWSYYFDYWGQGTLVTVSSGGGGSGGGGSDILLTQSPVILSVSPGERVSFSCRASQSIGTNIHWYQQRTNGSPRLLIKYASESISGIPSRFSGSGSGTDFTLSINSVESEDIADYYCQQNNNWPTTFGCGTKLELKRTVAAPSVFIFPPSDEQLKSGTASVVCLLNNFYPREAKVQWKVDNALQSGNSQESVTEQDSKDSTYSLSSTLTLSKADYEKHKVYACEVTHQGLSSPVTKSFNRGECGGGGSGGGGSGGGGSQSALTQPASVSGSPGQSITISCTGTSSDVGGYNFVSWYQQHPGKAPKLMIYDVSDRPSGVSDRFSGSKSGNTASLIISGLQADDEADYYCSSYGSSSTHVIFGGGTKVTVLGGGGSGGGGSGGGGSGGGGSQVQLQESGGGLVKPGGSLSLSCAASGFTFSSYWMSWVRQAPGKGLEWVANINRDGSASYYVDSVKGRFTISRDDAKNSLYLQMNSLRAEDTAVYYCARDRGVGYFDLWGRGTLVTVSS

SEQ ID NO: 305 - DNA, 3705 bp, Artificial Sequence
  Synthesized
gaaatcgtccttacacaatctcctagcacactgagtgtgagccccggcgaacgcgcgactttctcttgcagggcaagtcaatccatagggactaatatacattggtatcaacaaaagccaggtaaaccacccaggcttttgattaagtatgcaagtgagtctatttccggtatccctgaccgcttctctggatcaggcagtggcacagagttcacactcaccatatctagtgtgcaatcagaggacttcgccgtgtattactgccaacagaataataactggccgactaccttcggacccggtacaaagctgaccgttttaggcggtggcggtagtgggggaggcggttctggcggcggagggtccggcggtggaggatcacaagtacagttgcagcaatccggtcccggtctcgtcaaaccgagtgagacgcttagtataacgtgtactgtttcaggctttagccttacgaactatggagttcactggattcggcaggcacccggcaaaggtttggaatggctgggtgttatttggtcaggtggaaatacagactataacaccccctttacaagtcggttcacaattacgaaagataattccaaaaatcaagtttatttcaagttgagatccgtccgcgcggacgacactgcgatctactattgtgcgagggcactgacctactacgattacgaatttgcgtattgggggcaagggactcttgtaacagtctcgagcggtggaggcggatctggcggaggtggttccggcggtggcggctccggtggaggcggctctgaggtgcagctggtggagtctgggggaggcttggtccagcctggggggtccctgagactctcctgtgcagcctctggattcaccatcagtaccaatgcaatgagctgggtccgcgaggctccagggaagggcctggagtggatcggagtcattactggtcgtgatatcacatactacgcgagctgggcgaaaggcagattcaccatctccagagacaattccaagaacacgctgtatcttcaaatgaacagcctgagagccgaggacacggctgtgtattactgtgcgagagacggtggttcttctgctattactagtaacaacatttggggccagggaaccctggtcaccgtgtcctcagctagcaccaagggcccatcggtcttccccctggcaccctcctccaagagcacctctgggggcacagcggccctgggctgcctggtcaaggactacttccccgaaccggtgacggtgtcgtggaactcaggcgccctgaccagcggcgtgcacaccttcccggctgtcctacagtcctcaggactctactccctcagcagcgtggtgaccgtgccctccagcagcttgggcacccagacctacatctgcaacgtgaatcacaagcccagcaacaccaaggtggacaagagagttgagcccaaatcttgtgacaaaactcacacatgcccaccgtgcccagcacctgaagccgcgggggcaccgtcagtcttcctcttccccccaaaacccaaggacaccctcatgatctcccggacccctgaggtcacatgcgtggtggtggacgtgagccacgaagaccctgaggtcaagttcaactggtacgtggacggcgtggaggtgcataatgccaagacaaagccgcgggaggagcagtacaacagcacgtaccgtgtggtcagcgtcctcaccgtcctgcaccaggactggctgaatggcaaggagtacaagtgcgcggtctccaacaaagccctcccagcccccatcgagaaaaccatctccaaagccaaagggcagccccgagaaccacaggtgtacaccctgcccccatcccgggatgagctgaccaagaaccaggtcagcctgacctgcctggtcaaaggcttctatcccagcgacatcgccgtggagtgggagagcaatgggcagccggagaacaactacaagaccacgcctcccgtgctggactccgacggctccttcttcctctatagcaagctcaccgtggacaagagcaggtggcagcaggggaacgtcttctcatgctccgtgatgcatgaggctctgcacaaccactacacgcagaagagcctctccctgtctccgggtggcggtggagggtccggcggtggtggatccgaggtgcagctgttggagtctgggggaggcttggtacagcctggggggtccctgagactctcctgtgcagcctctggattctccttcagtagcgggtacgacatgtgctgggtccgccaggctccagggaaggggctggagtggatcgcatgcattgctgctggtagtgctggtatcacttacgacgcgaactgggcgaaaggccggttcaccatctccagagacaattccaagaacacgctgtatctgcaaatgaacagcctgagagccgaggacacggccgtatattactgtgcgagatcggcgttttcgttcgactacgccatggacctctggggccagggaaccctggtcaccgtgtcgagcggtggaggcggatctggcggaggtggttccggcggtggcggctccggtggaggcggctctgacatccagatgacccagtctccttccaccctgtctgcatctgtaggagacagagtcaccatcacttgccaggccagtcagagcattagttcccacttaaactggtatcagcagaaaccagggaaagcccctaagctcctgatctataaggcatccactctggcatctggggtcccatcaaggttcagcggcagtggatctgggacagaatttactctcaccatcagcagcctgcagcctgatgattttgcaacttattactgccaacagggttatagttggggtaatgttgataatgttttcggcggagggaccaaggtggagatcaaaggcggtggagggtccggcggtggtggctccggacggtcgctggtggagtctgggggaggcttggtccagcctggggggtccctgagactctcctgtactgcctctggattcaccatcagtagctaccacatgcagtgggtccgccaggctccagggaaggggctggagtacatcggaaccattagtagtggtggtaatgtatactacgcaagctccgctagaggcagattcaccatctccagaccctcgtccaagaacacggtggatcttcaaatgaacagcctgagagccgaggacacggctgtgtattactgtgcgagagactctggttatagtgatcctatgtggggccagggaaccctggtcaccgtctcttcaggcggtggcggtagtgggggaggcggttctggcggcggagggtccggcggtggaggatcagacgttgtgatgacccagtctccatcttccgtgtctgcatctgtaggagacagagtcaccatcacctgtcaggccagtcagaacattaggacttacttatcctggtatcagcagaaaccagggaaagcccctaagctcctgatctatgctgcagccaatctggcatctggggtcccatcaaggttcagcggcagtggatctgggacagatttcactctcaccatcagcgacctggagcctggcgatgctgcaacttactattgtcagtctacctatcttggtactgattatgttggcggtgctttcggcggagggaccaaggtggagatcaaatga

SEQ ID NO: 306 - protein, 1234 aa, Artificial Sequence
  Synthesized
EIVLTQSPSTLSVSPGERATFSCRASQSIGTNIHWYQQKPGKPPRLLIKYASESISGIPDRFSGSGSGTEFTLTISSVQSEDFAVYYCQQNNNWPTTFGPGTKLTVLGGGGSGGGGSGGGGSGGGGSQVQLQQSGPGLVKPSETLSITCTVSGFSLTNYGVHWIRQAPGKGLEWLGVIWSGGNTDYNTPFTSRFTITKDNSKNQVYFKLRSVRADDTAIYYCARALTYYDYEFAYWGQGTLVTVSSGGGGSGGGGSGGGGSGGGGSEVQLVESGGGLVQPGGSLRLSCAASGFTISTNAMSWVREAPGKGLEWIGVITGRDITYYASWAKGRFTISRDNSKNTLYLQMNSLRAEDTAVYYCARDGGSSAITSNNIWGQGTLVTVSSASTKGPSVFPLAPSSKSTSGGTAALGCLVKDYFPEPVTVSWNSGALTSGVHTFPAVLQSSGLYSLSSVVTVPSSSLGTQTYICNVNHKPSNTKVDKRVEPKSCDKTHTCPPCPAPEAAGAPSVFLFPPKPKDTLMISRTPEVTCVVVDVSHEDPEVKFNWYVDGVEVHNAKTKPREEQYNSTYRVVSVLTVLHQDWLNGKEYKCAVSNKALPAPIEKTISKAKGQPREPQVYTLPPSRDELTKNQVSLTCLVKGFYPSDIAVEWESNGQPENNYKTTPPVLDSDGSFFLYSKLTVDKSRWQQGNVFSCSVMHEALHNHYTQKSLSLSPGGGGGSGGGGSEVQLLESGGGLVQPGGSLRLSCAASGFSFSSGYDMCWVRQAPGKGLEWIACIAAGSAGITYDANWAKGRFTISRDNSKNTLYLQMNSLRAEDTAVYYCARSAFSFDYAMDLWGQGTLVTVSSGGGGSGGGGSGGGGSGGGGSDIQMTQSPSTLSASVGDRVTITCQASQSISSHLNWYQQKPGKAPKLLIYKASTLASGVPSRFSGSGSGTEFTLTISSLQPDDFATYYCQQGYSWGNVDNVFGGGTKVEIKGGGGSGGGGSGRSLVESGGGLVQPGGSLRLSCTASGFTISSYHMQWVRQAPGKGLEYIGTISSGGNVYYASSARGRFTISRPSSKNTVDLQMNSLRAEDTAVYYCARDSGYSDPMWGQGTLVTVSSGGGGSGGGGSGGGGSGGGGSDVVMTQSPSSVSASVGDRVTITCQASQNIRTYLSWYQQKPGKAPKLLIYAAANLASGVPSRFSGSGSGTDFTLTISDLEPGDAATYYCQSTYLGTDYVGGAFGGGTKVEIK

SEQ ID NO: 307 - DNA, 2220 bp, Artificial Sequence
  Synthesized
gaaaatgtattgacacagagccccgcctccctcagtgcctcacctggggaaagggtaactatcacttgctctgcatcaagcagcgtctcatacatgcattggtatcaacaaaagcctggacaggcccccaagctctggatatacgatacgagcaagctggcttccggcgtacctagccgcttcagtggttccggctcaggcaacgatcacacccttacgatttccagtatggaacccgaagattttgcaacttattattgtttccaggggagcgtgtacccattcactttcgggcaggggacaaaagtgaccgtcctaggcggtggcggtagtgggggaggcggttctggcggcggagggtccggcggtggaggatcacaggtcacattgaaggaatctggccccggccttgttcagccaggacagacccttagcctcacctgtgccttcagtggtttttctcttagcactagcggtatgggggtcggctggattcggcagcctcccggcaaaggtcttgagtggttggctcacatttggtgggacgacgacaaacggtataatcctgccttgaaaagtcggctgaccattagtaaggatacctcaaaaaatcaagtgtacttgcaaatgaatagccttgacgccgaggatacggctgtatattattgcgctcggatggaactctggtcttactactttgattattgggggcaggggactctcgtcacggtctcgagtggcggtggagggtccggcggtggtggatcagacgtcgtgatgacccagtctccttccaccctgtctgcatctgtaggagacagagtcaccatcaattgccaagccagtgagagcattagcagttggttagcctggtatcagcagaaaccagggaaagcccctaagctcctgatctatgaagcatccaaactggcatctggggtcccatcaaggttcagcggcagtggatctgggacagaatttactctcaccatcagcagcctgcagcctgatgattttgcaacttattactgccaaggctatttttattttattagtcgtacttatgtaaattctttcggcggcgggaccaaggtggagatcaaacgtacggtggctgcaccatctgtcttcatcttcccgccatctgatgagcagttgaaatctggaactgcctctgttgtgtgcctgctgaataacttctatcccagagaggccaaagtacagtggaaggtggataacgccctccaatcgggtaactcccaggagagtgtcacagagcaggacagcaaggacagcacctacagcctcagcagcaccctgacgctgagcaaagcagactacgagaaacacaaagtctacgcctgcgaagtcacccatcagggcctgagctcgcccgtcacaaagagcttcaacaggggagagtgtggcggtggcggtagcggtggcggcggaagtggtggcggaggatcccagtctgccctgactcagcctgcctccgtgtctgggtctcctggacagtcgatcaccatctcctgcactggaaccagcagtgacgttggtggttataactttgtctcctggtaccaacaacacccaggcaaagcccccaaactcatgatctatgatgtcagtgatcggccctcaggggtgtctgatcgcttctccggctccaagtctggcaacacggcctccctgatcatctctggcctccaggctgacgacgaggctgattattactgcagctcatatgggagcagcagcactcatgtgattttcggcggagggaccaaggtgaccgtcctaggtggaggcggttcaggcggaggtggttccggcggtggcggctccggtggaggcggctctcaggtgcaattgcaggagtcggggggaggcctggtcaagcctggagggtccctgagtctctcctgtgcagcctctggattcacctttagtagttattggatgagctgggtccgccaggctccagggaaggggctggagtgggtggccaacataaaccgcgatggaagtgcgagttactatgtggactctgtgaagggccgattcaccatctccagagacgacgccaagaactcactgtatctgcaaatgaacagcctgagagctgaggacacggctgtgtattactgtgcgagagatcgtggggtgggctacttcgatctctggggccgtggcaccctggtcaccgtctctagctga

SEQ ID NO: 308 - protein, 739 aa, Artificial Sequence
  Synthesized
ENVLTQSPASLSASPGERVTITCSASSSVSYMHWYQQKPGQAPKLWIYDTSKLASGVPSRFSGSGSGNDHTLTISSMEPEDFATYYCFQGSVYPFTFGQGTKVTVLGGGGSGGGGSGGGGSGGGGSQVTLKESGPGLVQPGQTLSLTCAFSGFSLSTSGMGVGWIRQPPGKGLEWLAHIWWDDDKRYNPALKSRLTISKDTSKNQVYLQMNSLDAEDTAVYYCARMELWSYYFDYWGQGTLVTVSSGGGGSGGGGSDVVMTQSPSTLSASVGDRVTINCQASESISSWLAWYQQKPGKAPKLLIYEASKLASGVPSRFSGSGSGTEFTLTISSLQPDDFATYYCQGYFYFISRTYVNSFGGGTKVEIKRTVAAPSVFIFPPSDEQLKSGTASVVCLLNNFYPREAKVQWKVDNALQSGNSQESVTEQDSKDSTYSLSSTLTLSKADYEKHKVYACEVTHQGLSSPVTKSFNRGECGGGGSGGGGSGGGGSQSALTQPASVSGSPGQSITISCTGTSSDVGGYNFVSWYQQHPGKAPKLMIYDVSDRPSGVSDRFSGSKSGNTASLIISGLQADDEADYYCSSYGSSSTHVIFGGGTKVTVLGGGGSGGGGSGGGGSGGGGSQVQLQESGGGLVKPGGSLSLSCAASGFTFSSYWMSWVRQAPGKGLEWVANINRDGSASYYVDSVKGRFTISRDDAKNSLYLQMNSLRAEDTAVYYCARDRGVGYFDLWGRGTLVTVSS
